(19) United States
(12) Patent Application Publication
(10) Pub. No.: US 2024/0140992 A1
(43) Pub. Date: May 2, 2024

(54) HEXADEPSIPEPTIDE COMPOUNDS AND METHODS OF USING THE SAME

(71) Applicants: Lodo Therapeutics Corporation, New York, NY (US); Zymergen Inc., Emeryville, CA (US)

(72) Inventors: Maria Diarey TIANERO-MCINTOSH, New York, NY (US); Arlene Atup SY-CORDERO, New York, NY (US); Bradley Morgan HOVER, New York, NY (US); Steven L. COLLETTI, New York, NY (US); Gayatri GOLLAPUDI, New York, NY (US)

(21) Appl. No.: 18/547,321

(22) PCT Filed: Feb. 22, 2022
(86) PCT No.: PCT/US2022/017263

§ 371 Date: Aug. 21, 2023

Related U.S. Application Data
(60) Provisional application No. 63/152,006, filed on Feb. 22, 2021.

(51) Int. Cl. C07K 11/02; C07K 14/36; C12N 9/00; C12N 9/10; C12N 15/52; C12N 15/76; C12P 21/02

(52) U.S. Cl. CPC C07K 11/02; C07K 14/36; C12N 9/1029; C12N 9/93; C12N 15/52; C12N 15/76; C12P 21/02; A61K 38/00

(57) ABSTRACT

The present disclosure provides compounds of Formula (I):

[chemical structure]

or a pharmaceutically acceptable salt, solvate, or tautomer thereof, and uses of the same in treating a disease or disorder (e.g., cancer or fibrosis).

### RELATED APPLICATIONS

[0001] This application claims priority to U.S. Provisional Application No. 63/152,006, filed Feb. 22, 2021, the entire contents of which is incorporated herein by reference.

### INCORPORATION BY REFERENCE OF SEQUENCE LISTING

[0002] The present application is being filed with a Sequence Listing in electronic format. The Sequence Listing is provided as a file entitled ZYMR-50901WO_SeqList.txt, created on Feb. 22, 2022, and is 778 kilobytes in size. The information in electronic format of the Sequence Listing is incorporated by reference in its entirety.

### BACKGROUND

[0003] Many examples of semisynthetic derivatives of natural product therapeutics are derived and inspired from cyclic peptides, such as cyclosporine, daptomycin, romidepsin, aplidine, atosiban, caspofungin, telavancin, linaclotide, and pasireotide. These structurally diverse molecules are the active pharmaceutical ingredients of prescribed drugs to treat a range of indications across many therapeutic applications such as immunosuppressants, antibacterials, antifungals, oncology, premature birth, IBS, and Cushings syndrome. One minimally studied natural product cyclic peptide is verucopeptin, a cyclic hexadepsipeptide which has demonstrated antiproliferative activity with potential applications to oncology. Over the last 10-20 years, the search for new biologically-active bacterially-produced natural products using the classical culturing approach has frequently led to the re-discovery of the same metabolites. Recently, methodology has been revolutionized to develop biologically active congeners that arise from evolutionarily related biosynthetic gene clusters. These congeners are structurally related to natural products. These close analogs typically engage the same therapeutic target, yet they often exhibit differences in biological activity, including differences in potency and therapeutic index to general cytotoxicity.

[0004] There is unmet medical need for the discovery of new agents to treat various conditions, including cancer and fibrosis. The present disclosure addresses this unmet need in the art.

### SUMMARY

[0005] In some aspects, the present disclosure provides, inter alia, a compounds of Formula (I):

[chemical structure]

or stereoisomer or mixture of stereoisomers thereof, or a pharmaceutically acceptable salt, solvate, hydrate, or tautomer, thereof.

[0006] In some embodiments, the compound of Formula (I) is substantially pure. In some embodiments, the compound of Formula (I) is enantiomerically pure.

[0007] In some embodiments, the disclosure provides for pharmaceutical compositions comprising a therapeutically effective amount of the compound of Formula (I) and one or more pharmaceutically acceptable excipients. In some embodiments, the pharmaceutical composition comprises a pharmaceutical carrier.

[0008] In some embodiments, the compound of Formula (I) is produced by a host cell comprising a heterologous biosynthetic gene cluster comprising at least six nonribosomal peptide synthetase (NRPS) modules and at least four polyketide synthase (PKS) modules, a set of modifying enzymes, precursor biosynthesis enzymes, transporters, and one or more transcriptional regulators.

[0009] In some embodiments, the biosynthetic gene cluster is isolated or derived from Streptomyces griseochromogenes.

[0010] In some embodiments, the biosynthetic gene cluster comprises a sequence of SEQ ID NO:1.

[0011] In some embodiments, the biosynthetic gene cluster comprises one or more modifications of SEQ ID NO: 1.

[0012] In some embodiments, the modification comprises a substitution, deletion, inversion, or insertion of one or more nucleotides relative to SEQ ID NO: 1.

[0013] In some embodiments, the modification comprises insertion of at least one promoter sequence.

[0014] In some embodiments, the promoter is selected from the group consisting of ermE, kasO, gapdh, and rpslp, or functional variants or derivatives thereof.

[0015] In some embodiments, the modification increases synthesis of the compound of Formula (I) compared to an otherwise equivalent host cell comprising an unmodified biosynthetic gene cluster.

[0016] In some embodiments, the host cell is a Streptomyces albus cell.

[0017] In some embodiments, the host cell further comprises a sequence encoding a Streptomyces Antibiotic Regulatory Protein (SARP) operably linked to a constitutive promoter.

[0018] In some embodiments, the present disclosure provides a polynucleotide comprising a biosynthetic gene cluster, wherein the biosynthetic gene cluster comprises one or more genes that contribute to the production of at least a portion of the compound of Formula (I) when the biosynthetic gene cluster is expressed by a host cell.

[0019] In some embodiments, the one or more genes comprise six nonribosomal peptide synthetase (NRPS) modules.

[0020] In some embodiments, the six NRPS modules are encoded by sequences comprising a first NRPS open reading frame of SEQ ID NO:14, a second NRPS open reading frame of SEQ ID NO: 15, a third NRPS open reading frame of SEQ ID NO: 16 and a fourth NRPS open reading frame of SEQ ID NO: 17, or sequences having at least 90%, at least 95%, at least 97% or at least 99% identity thereto.

[0021] In some embodiments, the one or more genes comprise four polyketide synthase (PKS) modules.

[0022] In some embodiments, the four PKS modules are encoded by sequences comprising a first PKS open reading frame of SEQ ID NO: 26 and a second PKS open reading frame of SEQ ID NO: 27, or sequences having at least 90%, at least 95%, at least 97% or at least 99% identity thereto.

[0023] In some embodiments, the biosynthetic gene complex comprises a SARP-encoding gene.

[0024] In some embodiments, the SARP-encoding gene comprises a sequence of SEQ ID NO: 28, or a sequence having at least 90%, at least 95%, at least 97% or at least 99% identity thereto.

[0025] In some embodiments, the biosynthetic gene cluster comprises a sequence of SEQ ID NO: 1, or a sequence having at least 90%, at least 95%, at least 97% or at least 99% identity thereto.

[0026] In some embodiments, the host cell is engineered to express the one or more genes in the biosynthetic cluster, which results in the production of the compound of Formula (I).

[0027] In some embodiments, overexpression of one or more genes in the biosynthetic cluster by the host cell increases the production of the compound of Formula (I) compared to an otherwise equivalent host cell comprising a biosynthetic gene cluster that does not overexpress one or more genes in the biosynthetic cluster.

[0028] In some embodiments, the SARP is overexpressed.

[0029] In some embodiments, overexpression of the SARP occurs in cis or in trans.

[0030] In some embodiments, trans overexpression of the SARP comprises expressing a sequence encoding the SARP open reading frame under the control of a constitutive ermE promoter, or a functional variant or derivative thereof.

[0031] In some embodiments, the ermk promoter comprises a sequence of SEQ ID NO:33.

[0032] In some embodiments, the biosynthetic gene cluster comprises one or more sequence modifications relative to a biosynthetic gene cluster of SEQ ID NO :1, or a sequence having at least 95%, at least 97% or at least 99% identity thereto.

[0033] In some embodiments, the one or more modifications of the biosynthetic gene cluster comprises a substitution, deletion, inversion, or insertion of one or more nucleotides relative to SEQ ID NO: 1.

[0034] In some embodiments, the one or more modifications comprise modifications of a promoter of a gene in the biosynthetic gene cluster.

[0035] In some embodiments, the one or more modifications comprise insertion of at least one heterologous promoter in the biosynthetic gene cluster.

[0036] In some embodiments, the at least one heterologous promoter is a strong promoter.

[0037] In some embodiments, the at least one heterologous promoter is selected from the group consisting of ermk, kasO, gapdh, and rpslp, or functional variants or derivatives thereof.

[0038] In some embodiments, the sequence of the ermE promoter comprises SEQ ID NO: 33, the sequence of the kasO promoter comprises SEQ ID NO:34, the sequence of the gapdh promoter comprises SEQ ID NO:35, and the sequence of the rpslp promoter comprises SEQ ID NO:36, or sequences having at least 90%, at least 95%, at least 97% or at least 99% identity thereto.

[0039] In some embodiments, inserting the at least one heterologous promoter into the biosynthetic gene cluster comprises a nucleic acid guided endonuclease.

[0040] In some embodiments, the nucleic acid guided endonuclease is in a complex with at least one guide nucleic acid (gNA).

[0041] In some embodiments, the nucleic acid guided endonuclease is a CRISPR/Cas endonuclease.

[0042] In some embodiments, the CRISPR/Cas endonuclease is Cas9.

[0043] In some embodiments, inserting the at least one heterologous promoter into the biosynthetic gene cluster further comprises a donor template comprising a sequence of the heterologous promoter.

[0044] In some embodiments, the biosynthetic gene cluster comprises an mbtH gene upstream of the four NRPS open reading frames, and wherein the at least one heterologous promoter is inserted upstream of the mbtH gene.

[0045] In some embodiments, the at least one heterologous promoter is a KasO promoter.

[0046] In some embodiments, the targeting sequence of the at least one gNA comprises SEQ ID NOS: 40-44, or a sequence having at least 80%, at least 85%, at least 90%, or at least 95% thereto.

[0047] In some embodiments, the biosynthetic gene cluster comprises a sequence of SEQ ID NO: SEQ ID NO: 49.

[0048] In some embodiments, the at least one heterologous promoter is inserted between the sequence of the SARP-encoding gene and the first PKS open reading frame.

[0049] In some embodiments, the biosynthetic gene cluster comprises an ornithine monooxygenase gene downstream of the second PKS open reading frame, and wherein the at last one heterologous promoter is inserted downstream of the second PKS open reading frame and upstream of the ornithine monooxygenase gene.

[0050] In some embodiments, the at least one modification of the biosynthetic gene cluster comprises a modification that results in overexpression of the SARP-encoding gene in comparison to the expression of the SARP-encoding gene by the biosynthetic gene cluster of SEQ ID NO: 1.

[0051] In some embodiments, at least one modification of the biosynthetic gene cluster comprises replacement of at least one promoter in comparison to the biosynthetic gene cluster of SEQ ID NO: 1.

[0052] In some embodiments, replacement of the at least one promoter comprises replacement a SARP-encoding gene promoter.

[0053] In some embodiments, the SARP-encoding gene promoter is replaced with a promoter selected from the group consisting of ermE, kasO, gapdh, and rpslp.

[0054] In some embodiments, the biosynthetic gene cluster comprises a sequence of SEQ ID NO: 50.

[0055] In some embodiments, the biosynthetic gene cluster is isolated or derived from Streptomyces griseochromogenes.

[0056] In some embodiments, the biosynthetic gene cluster produces the compound of Formula (I) in the host cell.

[0057] In some embodiments, the present disclosure provides a vector comprising the polynucleotide as described herein.

[0058] In some embodiments, the vector is a bacterial artificial chromosomal vector.

[0059] In some embodiments, the vector further comprises at least one promoter.

[0060] In some embodiments, the vector is suitable for expression in a Streptomyces species cell.

[0061] In some embodiments, the present disclosure provides a host cell comprising the polynucleotide as described herein or the vector as described herein.

[0062] In some embodiments, the present disclosure provides a host cell, comprising the polynucleotide as described herein and a polynucleotide comprising a sequence encoding a SARP operably linked to a constitutive promoter.

[0063] In some embodiments, the constitutive promoter is an ermE promoter.

[0064] In some embodiments, the SARP is encoded by a sequence of SEQ ID NO: 28.

[0065] In some embodiments, the host cell is a Streptomyces cell.

[0066] In some embodiments, the Streptomyces cell is a Streptomyces griseochromogenes, Streptomyces lividans or Streptomyces albus cell.

[0067] In one aspect, the present disclosure provides a method of making a polynucleotide comprising a modified biosynthetic gene cluster comprising:
[0068] a. providing a first E. coli host cell comprising a first vector comprising a sequence of biosynthetic gene cluster comprising a target sequence;
[0069] b. introducing the first vector into a Streptomyces host cell by conjugation;
[0070] c. providing a second E. coli host cell comprising a second vector comprising:
   [0071] i. a sequence of at least one gNA specific to the target sequence operably linked to a promoter,
   [0072] ii. a sequence encoding an endonuclease; and
   [0073] iii. a sequence encoding a donor template; and
[0074] d. introducing the second vector into a Streptomyces host cell by conjugation; whereby introducing the second vector into the Streptomyces host cell produces a double strand break in the target sequence and introduction of a donor template sequence, thereby generating a Streptomyces host cell comprising a modified biosynthetic gene cluster.

[0075] In some embodiments, the biosynthetic gene cluster is an unmodified biosynthetic gene cluster. In some embodiments, the unmodified biosynthetic gene cluster comprises a sequence of SEQ ID NO: 1.

[0076] In some embodiments, the endonuclease is a Cas9 endonuclease.

[0077] In some embodiments, the donor template comprises, from 5′ to 3′, a sequence homologous to a sequence 5′ of the target sequence, a sequence of a promoter, and sequence homologous to a sequence 3′ of the target sequence.

[0078] In some embodiments, the promoter is selected from the group consisting of ermE, kasO, gapdh, and rpslp, or functional variants or derivatives thereof.

[0079] In some embodiments, at least one gNA comprises a target sequence selected from the group consisting of SEQ ID NOS: 40-44.

[0080] In one aspect, the present disclosure provides a method of making the compound of Formula (I), comprising
[0081] a. introducing into a host cell the polynucleotide of the present disclosure or the vector of the present disclosure;
[0082] b. culturing the host cell under conditions sufficient for the synthesis of the compound of Formula (I) by the biosynthetic gene cluster; and
[0083] c. isolating and purifying the compound of Formula (I).

[0084] In some embodiments, the host cell is a an Actinobacterial cell or a Streptomyces cell.

[0085] In some embodiments, the Streptomyces cell is a Streptomyces griseochromogenes, Streptomyces albus or Streptomyces lividans cell.

[0086] In some embodiments, the host cell comprises a sequence encoding a SARP operably linked to a constitutive promoter.

[0087] In some embodiments, the polynucleotide or vector is introduced into the host cell by conjugation with an E. coli comprising the polynucleotide or vector.

[0088] In some embodiments, the present disclosure provides a pharmaceutical composition, comprising the compound of Formula (I), and a pharmaceutically acceptable excipient.

[0089] In some embodiments, the present disclosure provides a method of treating a disease or disorder in a subject, comprising administering the compound of Formula (I) or pharmaceutical composition thereof.

[0090] In some embodiments, the present disclosure provides the compound of Formula (I) or the pharmaceutical composition thereof, for use in treating a disease or disorder in a subject.

[0091] In some embodiments, the present disclosure provides a compound of Formula (I) for use in the manufacture of a medicament for treating a disease or disorder in a subject.

[0092] In some embodiments, the present disclosure provides the use of a compound of Formula (I) or the pharmaceutical composition thereof, for the treatment of a disease or disorder.

[0093] In some embodiments, the disease or disorder is cancer.

[0094] In some embodiments, the disease or disorder is fibrosis.

[0095] In some embodiments, the subject is human.

[0096] Unless otherwise defined, all technical and scientific terms used herein have the same meaning as commonly understood by one of ordinary skill in the art to which this disclosure belongs. In the specification, the singular forms also include the plural unless the context clearly dictates otherwise. Although methods and materials similar or equivalent to those described herein can be used in the practice or testing of the present disclosure, suitable methods and materials are described below. All publications, patent applications, patents and other references mentioned herein are incorporated by reference. The references cited herein are not admitted to be prior art to the claimed invention. In the case of conflict, the present specification, including definitions, will control. In addition, the materials, methods and examples are illustrative only and are not intended to be limiting. In the case of conflict between the chemical structures and names of the compounds disclosed herein, the chemical structures will control.

[0097] Other features and advantages of the disclosure will be apparent from the following detailed description and claims

### BRIEF DESCRIPTION OF THE DRAWINGS

[0098] The patent or application file contains at least one drawing executed in color. Copies of this patent or patent application publication with color drawing(s) will be provided by the Office upon request and payment of the necessary fee.

[0099] FIG. 1 depicts the proposed biosynthesis of Formula (I) from the AZT010 biosynthetic gene cluster.

[0100] FIG. 2A depicts cloning and overexpression of SARP in trans from the AZT010 biosynthetic gene cluster, followed by detection of the compound of Formula (I) using stable isotopic labeling.

[0101] FIG. 2B depicts the target peak of the compound of Formula (I) from an extract of S. griseochromogenes comprising the AZT010 biosynthetic gene cluster, that overexpresses SARP as shown in FIG. 2A. The top left panel (“SG-AZT010-WT”) shows there is no quantifiable peak corresponding to the compound of Formula (I).

[0102] FIG. 3 depicts promoter engineering of the AZT010 biosynthetic gene cluster to increase production titer. Promoter insertion sites in the AZT010 biosynthetic gene cluster are shown. The plot at bottom depicts a representative set of titers produced by the SA-pDualP-AZT010-kasO* construct, as compared to other engineered versions of the biosynthetic gene cluster, and the wild type biosynthetic gene cluster.

[0103] FIG. 4A depicts the 2D NMR structure of the compound of Formula (I).

[0104] FIG. 4B depicts the HR-ESI-MSMS fragmentation of the compound of Formula (I).

[0105] FIG. 4C depicts a mass spectrogram of the compound of Formula (I).

### DETAILED DESCRIPTION

[0106] The present disclosure relates to the compound of Formula (I) and to the use of the compound of Formula (I) in the treatment of cancer or fibrosis. In some embodiments, the disclosure relates to the biosynthesis of the compound of Formula (I).

### Definitions

[0107] Unless otherwise stated, the following terms used in the specification and claims have the following meanings set out below.

[0108] In some embodiments, “the compound of Formula (I)” and “a compound of Formula (I)” includes all stereoisomer, mixture of stereoisomers, pharmaceutically acceptable salts, solvates, or tautomers thereof.

[0109] As used herein, the expressions “one or more of A, B, or C,” “one or more A, B, or C,” “one or more of A, B, and C,” “one or more A, B, and C,” “selected from the group consisting of A, B, and C”, “selected from A, B, and C”, and the like are used interchangeably and all refer to a selection from a group consisting of A, B, and/or C, i.e., one or more As, one or more Bs, one or more Cs, or any combination thereof, unless indicated otherwise.

[0110] As used herein, “natural product” refers to a compound that is synthesized by a living organism (e.g., bacteria) under normal physiological conditions and the compound can be quantified, and identified as a pathway specific product, using known techniques in the art. If one skilled in the art cannot quantify a compound in, e.g., extracts of native bacterial cells containing a biosynthetic gene cluster after culturing said cells with a growth media containing the nutrients required to produce a compound, one skilled in the art would reasonably believe that the bacterial cells do not naturally produce the compound (i.e., the compound is not a “natural product”). For the avoidance of doubt, the compounds disclosed herein are not “natural products,” because Applicant was not able to quantify the compound of Formula 1 in the native bacterial cells containing the biosynthetic gene cluster. For example, as described in Example 2, Applicant was not able to quantify the compound of Formula (I) in extracts of AZT010 despite culturing said cells under appropriate conditions. (See also FIG. 2B, left panel, compare top (“SG-AZT010-WT”) and bottom (“SG-AZT010-PIJ10257-SARP”); and FIG. 3, bottom panel showing no quantifiable amount of the compound of Formula 1 in wild type (SG-AZT010-WT)).

[0111] As used herein, “module” refers to a set of active site domains of a protein that catalyze one or more of the biosynthetic steps leading to the compound of Formula (I). Thus, each module may be composed of a protein, or a module may be composed of a plurality of domains. In some embodiments, heterologous protein domains may be fused together to form a module. In some embodiments, an open reading frame may be polycistronic, and encode a plurality of distinct proteins, each of which comprise one or more domains or modules. In some embodiments, an open reading frame may encode a single protein, which has a plurality of modules, each of which comprises a combination of domains.

[0112] It is to be understood that, throughout the description, where compositions are described as having, including, or comprising specific components, it is contemplated that compositions also consist essentially of, or consist of, the recited components. Similarly, where methods or processes are described as having, including, or comprising specific process steps, the processes also consist essentially of, or consist of, the recited processing steps. Further, it should be understood that the order of steps or order for performing certain actions is immaterial so long as the invention remains operable. Moreover, two or more steps or actions can be conducted simultaneously.

[0113] It is to be understood that, for the compounds of the present disclosure being capable of further forming salts, all of these forms are also contemplated within the scope of the claimed disclosure.

[0114] As used herein, the term “pharmaceutically acceptable salts” refer to derivatives of the compounds of the present disclosure wherein the parent compound is modified by making acid or base salts thereof. Examples of pharmaceutically acceptable salts include, but are not limited to, mineral or organic acid salts of basic residues such as amines, alkali or organic salts of acidic residues such as carboxylic acids, and the like. The pharmaceutically acceptable salts include the conventional non-toxic salts or the quaternary ammonium salts of the parent compound formed, for example, from non-toxic inorganic or organic acids. For example, such conventional non-toxic salts include, but are not limited to, those derived from inorganic and organic acids selected from 2-acetoxybenzoic, 2-hydroxyethane sulfonic, acetic, ascorbic, benzene sulfonic, benzoic, bicarbonic, carbonic, citric, edetic, ethane disulfonic, 1,2-ethane sulfonic, fumaric, glucoheptonic, gluconic, glutamic, glycolic, glycollyarsanilic, hexylresorcinic, hydrabamic, hydrobromic, hydrochloric, hydroiodic, hydroxymaleic, hydroxynaphthoic, isethionic, lactic, lactobionic, lauryl sulfonic, maleic, malic, mandelic, methane sulfonic, napsylic, nitric, oxalic, pamoic, pantothenic, phenylacetic, phosphoric, polygalacturonic, propionic, salicylic, stearic, subacetic, succinic, sulfamic, sulfanilic, sulfuric, tannic, tartaric, toluene sulfonic, and the commonly occurring amine acids, e.g., glycine, alanine, phenylalanine, arginine, etc.

[0115] In some embodiments, the pharmaceutically acceptable salt is a sodium salt, a potassium salt, a calcium salt, a magnesium salt, a diethylamine salt, a choline salt, a meglumine salt, a benzathine salt, a tromethamine salt, an ammonia salt, an arginine salt, or a lysine salt.

[0116] Other examples of pharmaceutically acceptable salts include hexanoic acid, cyclopentane propionic acid, pyruvic acid, malonic acid, 3-(4-hydroxybenzoyl)benzoic acid, cinnamic acid, 4-chlorobenzenesulfonic acid, 2-naphthalenesulfonic acid, 4-toluenesulfonic acid, camphorsulfonic acid, 4-methylbicyclo-[2.2.2]-oct-2-ene-1-carboxylic acid, 3-phenylpropionic acid, trimethylacetic acid, tertiary butylacetic acid, muconic acid, and the like. The present disclosure also encompasses salts formed when an acidic proton present in the parent compound either is replaced by a metal ion, e.g., an alkali metal ion, an alkaline earth ion, or an aluminum ion; or coordinates with an organic base such as ethanolamine, diethanolamine, triethanolamine, tromethamine, N-methylglucamine, and the like. In the salt form, it is understood that the ratio of the compound to the cation or anion of the salt can be 1:1, or any ratio other than 1:1, e.g., 3:1, 2:1, 1:2, or 1:3.

[0117] It is to be understood that all references to pharmaceutically acceptable salts include solvent addition forms (solvates) or crystal forms (polymorphs) as defined herein, of the same salt.

[0118] As used herein, the term “treating” or “treat” describes the management and care of a patient for the purpose of combating a disease, condition, or disorder and includes the administration of the compound of Formula (I) to alleviate the symptoms or complications of a disease, condition or disorder, to eliminate the disease, condition or disorder, or to prevent the disease, condition or disorder. The term “treat” can also include treatment of a cell in vitro or an animal model. It is to be appreciated that references to “treating” or “treatment” include the alleviation of established symptoms of a condition. “Treating” or “treatment” of a state, disorder or condition therefore includes: (1) preventing or delaying the appearance of clinical symptoms of the state, disorder or condition developing in a human that may be afflicted with or predisposed to the state, disorder or condition but does not yet experience or display clinical or subclinical symptoms of the state, disorder or condition, (2) inhibiting the state, disorder or condition, i.e., arresting, reducing or delaying the development of the disease or a relapse thereof (in case of maintenance treatment) or at least one clinical or subclinical symptom thereof, or (3) relieving or attenuating the disease, i.e., causing regression of the state, disorder or condition or at least one of its clinical or subclinical symptoms.

[0119] As used herein, the term “pharmaceutically acceptable” refers to those compounds, anions, cations, materials, compositions, carriers, and/or dosage forms which are, within the scope of sound medical judgment, suitable for use in contact with the tissues of human beings and animals without excessive toxicity, irritation, allergic response, or other problem or complication, commensurate with a reasonable benefit/risk ratio.

[0120] As used herein, the term “pharmaceutically acceptable excipient” means an excipient that is useful in preparing a pharmaceutical composition that is generally safe, non-toxic and neither biologically nor otherwise undesirable, and includes excipient that is acceptable for veterinary use as well as human pharmaceutical use. A “pharmaceutically acceptable excipient” as used in the specification and claims includes both one and more than one such excipient.

[0121] As used herein, the term “therapeutically effective amount” refers to an amount of a pharmaceutical agent to treat, ameliorate, or prevent an identified disease or condition, or to exhibit a detectable therapeutic or inhibitory effect. The effect can be detected by any assay method known in the art. The precise effective amount for a subject will depend upon the subject's body weight, size, and health; the nature and extent of the condition; and the therapeutic or combination of therapeutics selected for administration.

[0122] All percentages and ratios used herein, unless otherwise indicated, are by weight. Other features and advantages of the present disclosure are apparent from the different examples. The provided examples illustrate different components and methodology useful in practicing the present disclosure. The examples do not limit the claimed disclosure. Based on the present disclosure the skilled artisan can identify and employ other components and methodology useful for practicing the present disclosure.

[0123] The terms “polynucleotide” and “nucleic acid” are used interchangeably herein and refer to a polymeric form of nucleotides of any length, i.e., ribonucleotides or deoxyribonucleotides or analogs thereof. These terms refer to the primary structure of the molecule and thus encompass double-and single-stranded DNA as well as double- and single-stranded RNA. The term also encompasses modified nucleic acids, such as methylated and/or capped nucleic acids, nucleic acids containing modified bases, backbone modifications, and the like.

[0124] As used herein, the term “gene” refers to any segment of DNA associated with a biological function. Thus, a gene includes, but is not limited to, coding sequences and/or regulatory sequences required for its expression. Genes may also comprise non-expressed DNA segments, e.g. forming recognition sequences for other proteins. Genes can be obtained from a variety of sources, including cloning from a source of interest or synthesis from known or predicted sequence information, and can comprise sequences designed to have desired parameters.

[0125] In some embodiments, the genomic DNA, prior to modification, is isolated from bacteria cells originally found in soil.

[0126] As used herein, the term “homologous” or “homolog” or “ortholog” is known in the art and refers to related sequences that share a common ancestor or family member and are determined based on the degree of sequence identity. The terms “substantially similar” and “substantially corresponding” are used interchangeably herein. The term refers to nucleic acid fragments wherein the difference in one or more nucleotide bases does not affect the ability of the nucleic acid fragment to mediate gene expression or produce a certain phenotype. These terms also refer to modifications of the nucleic acid fragments of the disclosure, such as deletions or insertions of one or more nucleotides that do not substantially alter the functional properties of the resulting nucleic acid fragment relative to the original, unmodified fragment. Thus, as will be understood by those skilled in the art, it is to be understood that the present disclosure encompasses more than the specific exemplary sequences. These terms “homologous” or “homolog” or “ortholog” or “substantially similar” or “substantially corresponding” may describe the relationship between a gene found in one species, subspecies, variety, or strain and the corresponding or equivalent gene in another species, subspecies, variety, or strain.

[0127] As used herein, the terms “endogenous” and “native” refer to naturally occurring copies of a gene or promoter.

[0128] As used herein, the term “naturally occurring” refers to a gene that is derived from a naturally occurring source. In some aspects, a naturally occurring gene refers to a gene that is a wild-type (non-transgenic) gene, whether located in an endogenous environment within its source organism or placed in a “heterologous” environment when introduced into a different organism. Thus, for purposes of this disclosure, a “non-naturally occurring” gene is one that has been mutated or otherwise modified or synthesized to have a sequence that differs from a known native gene. In some aspects, the modification may be at the protein level (e.g., amino acid substitution). In other aspects, the modification can be at the DNA level without any effect on the protein sequence (e.g., codon optimization).

[0129] For the purposes of this disclosure, homologous sequences are compared. “Homologous sequences” or “homologs” or “orthologs” are believed, believed or known to be functionally related. The functional relationships may be indicated in any of a number of ways, including but not limited to: (a) the degree of sequence identity and/or (b) the same or similar biological function. Preferably, both (a) and (b) are indicated. Homology can be determined using default parameters using software programs readily available in the art, such as NCBI BLAST (basic local alignment search tool).

[0130] Percentage identity determinations can be performed for nucleic acids using BLASTN or standard nucleotide BLAST using default settings (Match/Mismatch scores 1, −2) Gap costs linear, Expect threshold 10, Word size 28, and match matches in a query range 0) and for proteins using BLAST using default settings (Expect threshold 10, Word size 3, Max matches in a query range 0, Matrix Blosum62, Gap costs Existence 11, extension 1 and conditional compositional score matrix adjustment).

[0131] As used herein, the term “nucleotide change” refers to, for example, a nucleotide substitution, deletion, and/or insertion, as is well known in the art. For example, mutations contain alterations that produce silent substitutions, additions or deletions without altering the properties or activity of the encoded protein or the manner in which the protein is made.

[0132] As used herein, the term “heterologous” refers to an amino acid or nucleic acid sequence (e.g., a gene or promoter) that is not naturally occurring in a particular organism or is not naturally occurring in a particular context (e.g., a genomic or plasmid location) in a particular organism. For example, a native promoter or other nucleic acid sequence of Streptomyces albus may be heterologous when operably linked to a nucleic acid sequence which is not operably linked in the wild-type Streptomyces albus, or when the native promoter or other nucleic acid sequence is delivered in a non-native form (e.g.as a heterologous plasmid or heterologous nucleic acid sequence).

[0133] As used herein, the term “exogenous” is used interchangeably with the term

[0134] “heterologous” and refers to material from a source other than its natural source. For example, the term “exogenous protein” or “exogenous gene” refers to a protein or gene that is derived from a non-natural source or location and that has been artificially supplied to a biological system.

[0135] All publications and patent documents cited herein are incorporated herein by reference as if each such publication or document was specifically and individually indicated to be incorporated herein by reference. Citation of publications and patent documents is not intended as an admission that any is pertinent prior art, nor does it constitute any admission as to the contents or date of the same. The invention having now been described by way of written description, those of skill in the art will recognize that the invention can be practiced in a variety of embodiments and that the foregoing description and examples below are for purposes of illustration and not limitation of the claims that follow.

[0136] As use herein, the phrase “compound of the disclosure” refers to those compounds which are disclosed herein, both generically and specifically.

### Compounds of the Present Disclosure

[0137] In some aspects, the present disclosure provides, inter alia, a compounds of Formula (I):

[chemical structure]

or a stereoisomer, mixture of stereoisomers, a pharmaceutically acceptable salt, solvate, or tautomer thereof.

[0138] In some embodiments, the compound of Formula (I) is a stereoisomer, mixture of stereoisomers, a pharmaceutically acceptable salt, solvate, or tautomer of Formula (I).

[0139] In some embodiments, the compound of Formula (I) is a stereoisomer of Formula (I).

[0140] In some embodiments, the compound of Formula (I) is a mixture of stereoisomers of Formula (I).

[0141] In some embodiments, the compound of Formula (I) is a pharmaceutically acceptable salt of Formula (I).

[0142] In some embodiments, the compound of Formula (I) is a solvate of Formula (I).

[0143] In some embodiments, the compound of Formula (I) is a tautomer of Formula (I).

[0144] The compounds of the disclosure are cyclic peptides. The compounds contain a hexadepsipeptide core, which is composed of 6 amino acid cyclized through peptide bonds, and a polyketide tail.

[0145] The compounds of Formula (I) comprise nine stereocenters.

[0146] In some embodiments, the compound of Formula (I) is Formula IA, wherein each stereocenters is identified with an *:

[chemical structure]

[0147] In some embodiments, each * of Formula IA represents a bond which is either (R) or (S).

[0148] In some embodiments, *2 of Formula IA is (R). In some embodiments, *2 of Formula IA is (S).

[0149] In some embodiments, *5 of Formula IA is (R). In some embodiments, *5 of Formula IA is (S).

[0150] In some embodiments, *10 of Formula IA is (R). In some embodiments, *10 of Formula IA is (S).

[0151] In some embodiments, *12 of Formula IA is (R). In some embodiments, *12 of Formula IA is (S).

[0152] In some embodiments, *20 of Formula IA is (R). In some embodiments, *20 of Formula IA is (S).

[0153] In some embodiments, *23 of Formula IA is (R). In some embodiments, *23 of Formula IA is (S).

[0154] In some embodiments, *28 of Formula IA is (R). In some embodiments, *28 of Formula IA is (S).

[0155] In some embodiments, *29 of Formula IA is (R). In some embodiments, *29 of Formula IA is (S).

[0156] In some embodiments, *34 of Formula IA is (R). In some embodiments, *34 of Formula IA is (S).

[0157] In some embodiments of the compound of Formula IA, a1 and a2 represent the stereochemistry of the alkene bond.

[0158] In some embodiments of the compound of Formula IA, alkene bond a1 is cis. In some embodiments of the compound of Formula IA, alkene bond a1 is trans.

[0159] In some embodiments of the compound of Formula IA, alkene bond a2 is cis. In some embodiments of the compound of Formula IA, alkene bond a2 is trans.

[0160] In some embodiments, the compounds of the disclosure provide a scaffold which can be derivatized to create therapeutic agents. In some embodiments, the compounds of the disclosure, themselves, are therapeutic agents.

[0161] For example, in some embodiments, the compounds of the disclosure target Wnt/betacatenin (or β-catenin) signaling pathway. Wnt/β-catenin signaling, a highly conserved pathway through evolution, regulates key cellular functions including proliferation, differentiation, migration, genetic stability, apoptosis, and stem cell renewal. The Wnt pathway mediates biological processes but the effect depends on the involvement of β-catenin in signal transduction. β-catenin is a core component of the cadherin protein complex, whose stabilization is essential for the activation of Wnt/β-catenin signaling.

[0162] Without wishing to be bound by theory, it is thought that the azinothricin family of compounds targets Wnt/β-catenin signaling, and exhibits strong antitumor and antibacterial activity. Alternatively, or in addition, HIF-1alpha and v-ATPase have recently been suggested to be the direct targets of this family of molecules Azinothricin compounds are cyclic hexadepsipeptides that are characterised by a 19-membered cyclodepsipeptide ring composed of 6 unusual amino acids (hexadepsipeptide) and an acyl side chain connected through an amide bond. The first member of this class, azinothricin, was reported from Streptomyces X-14950. Because of the strong antitumor and antibacterial activity, significant efforts have been made to identify bacterially-produced natural products using the classical culturing approach. However, the discovery of new drug candidates using culturing approaches has been limited.

[0163] Instead of culturing, Applicant has mined genomes for biosynthetic gene clusters (BGC) similar to those associated with azinothricin, in order to identify potentially new compound structures.

[0164] Using this approach, Applicant found a biosynthetic gene cluster (BGC) termed AZT010, was identified from the genome of Streptomyces griseochromogenes strain ATC(' 14511. The AZT010 BGC had potential to produce hexadepsipeptide; however, as described in Example 2, one skilled in the art would reasonably believe that the AZT010 BGC did not naturally produce the hexadepsipeptide of Formula (I). See also FIG. 2B, left panel, compare top (“SG-AZT010-WT”) and bottom (“SG-AZT010-PIJ10257-SARP”); and FIG. 3, bottom panel showing no quantifiable amount of the compound of Formula 1 in wild type (“SG-AZT010-WT”)).

[0165] The BGC in AZT010 contains a Streptomyces Antibiotic Regulatory Protein (SARP) regulator aztT10 in the middle of the core genes. A SARP regulator is a class of BGC specific regulators that act as positive regulators of compound expression in many species of Streptomyces. The inability to quantify compounds of Formula (I) suggested that SARP expression levels were not sufficient to produce the compounds of Formula (I).

[0166] Thus, Applicant overexpressed SARP aztT10 by cloning it into an integrative plasmid, PIJ10257, under the control of constitutive ermE* promoter—a strong heterologous promoter not present in the naturally occurring AZT010 BGC. The promoter was added to initiate transcription of RNA, and consequently synthesize the compounds of Formula (I).

### Polynucleotides and Vectors

[0167] The disclosure provides polynucleotides comprising a biosynthetic gene cluster comprising one or more genes that contribute to the production of at least a portion of the compound of Formula (I) when the biosynthetic gene cluster is expressed by a host cell. Host cells expressing the polynucleotides of the disclosure can be used in the manufacture of the compound of Formula (I). In some embodiments, the biosynthetic gene cluster (BGC) can be wild type, i.e. not subject to modifications through genetic engineering methods known in the art. In other embodiments, the BGC is subject to one or more modifications, for example modifications that increase, or result in, expression of the compound of Formula (I) by the host cell.

### Biosynthetic Gene Cluster

[0168] In some embodiments, the biosynthetic gene cluster involved in the production of the compound of Formula (I) is isolated or derived from a Streptomyces species of bacteria. Streptomyces are a species of Actinobacteria, and the type genus of the family Streptomycetaceae. Over 500 species of Streptomyces have been described to date, all of which are envisaged as within the scope of the instant disclosure. In some embodiments, the biosynthetic gene cluster is isolated or derived from Streptomyces griseochromogenes.

[0169] In some embodiments, the biosynthetic gene cluster comprises one or more genes that contribute to the production of at least a portion of the compound of Formula (I) when the biosynthetic gene cluster is expressed by a host cell. As a non-limiting example, the biosynthetic gene cluster comprises at least one gene that, together with other genes in the host genome and/or the biosynthetic gene cluster, catalyzes or contributes to at least one biosynthetic step that results in the production of the compound of Formula (I) from a precursor compound. Exemplary precursor compounds are shown in FIG. 1.

[0170] In some embodiments, the biosynthetic gene cluster comprises at least one nonribosomal peptide synthetase module. Nonribosomal peptide synthetases (NRPS) are enzymes which, unlike ribosomes, synthesize their own peptidic products independent of messenger RNA. NRPS are modular enzymes that catalyze synthesis of important peptide products from a variety of standard and non-proteinogenic amino acid substrates. Typically, each NRPS can synthesize one type of non-ribosomal peptide. Nonribosomal peptides often have cyclic and/or branched structures, can contain non-proteinogenic amino acids including D-amino acids, carry modifications like N-methyl and N-formyl groups, or are glycosylated, acylated, halogenated, or hydroxylated. The NRPS genes for an individual peptide are frequently organized into operons in bacteria. Functionally related operons may be organized into gene clusters. NRPS enzymes are organized in modules, each module comprising multiple catalytic domains that are responsible for incorporation of a single amino acid residue. In an exemplary NRPS module, a first domain activates and covalently attaches an amino acid to an integrated carrier protein domain, and the substrates and intermediates are then delivered to neighboring catalytic domains for peptide bond formation or, in some modules, chemical modification. In the final module, the peptide is delivered to a terminal thioesterase domain that catalyzes release of the peptide product. All NRPS, and modules thereof, that are capable of contributing to the production of the compound of Formula (I) are envisaged as within the scope of the instant disclosure.

[0171] In some embodiments, the one or more genes comprise at least one nonribosomal peptide synthetase (NRPS) module. In some embodiments, the one or more genes comprise at least 1, 2, 3, 4, 5, 6, or more NRPS modules. In some embodiments, the one or more genes comprise six NRPS modules. Sequences of representative NRPS modules are described in Table 1, below.

TABLE 1
NRPS Modules

| | | DNA |
|---|---|---|
| Name | Amino Acid Sequence | Sequence |
| aztN10 | IPLSFAQRRLWFVDRFEGPSPAYNGPLALRLTGELNVGALQAAVGDLIDRHEALR | SEQ ID |
| (module | TVIVEDDDGVPHQRVLPSGQKRFGLRVVEAATEEERAAAVDEAATGTFDLAADVP | NO: 2 |
| 1) | IRARLVRRGPREHTLVLVMHHIAVDGESFGPLCRDLITAYTARQEGRAPAWEPLP | |
| | VQYADYTLWQRDVLGDEADPHSLAARQLEYWRRTLADLAQPLAFPTDRPRPKTMS | |
| | HHGDMVPFSIDPGLLRSVEKLAAQADTTVSMVMQSALAVLLHHLGCGDDVPIGAP | |
| | IAGRTDEELRELVGFFVNTWVLRVDLSGNPTFRELLQRVRERALAAYDNQDMPFE | |
| | RLVELLNPDRSTAYNPLFQVMLAWQPPIPEPEFPGLDVQSERLETATAKFDLFFD | |
| | LIPHGSGGARCRLEYRTDLFDRDTVEGIANRFVRVLGRLVADAERRIGGIDVLDA | |
| | AERGRLLTQFNDTATAVPELTVPELFESQVARTPDAPAVVCDDRTLTYRELDERA | |
| | DGVARELVRRGAGPEDLVVLALPRTEDLVAGLLGILKSGAGYLPMDPQYLAGRAE | |
| | SVLAEARPRFVVTDTKTSQDLPPNDMSSIYLDDRAQWDAPVKTPDDGGRISPPRP | |
| | DNLAYVMYTSGSTGKPKGAAITHRNVVNGVRELSRVLDAPPGWRMLAGTSVNFDV | |
| | SVFELLTTLSTGGTAEVVPNALALGERDSWDGHVISAVPSVLGELVGHLEKTTDV | |
| | RTVVFAGDVLPARLVRQVREALPGVQVVNSYGQSESFYATTFALPASEEWAESEV | |
| | APIGTPLGNMRAYVLGPGLAPVPQGAVGELYVVGTCLGRGYHGRPGLTAERYVAN | |
| | PFGPAGERMYRTGDLARWNARGRLECLGRGDGQVKVRGFRIETAEVEAALTAHPG | |
| | ISEAVVISRDVSPGGRRLVAYVVHAGEGAVGDDGAGGIGDVDVLAGASAAELRTF | |
| | VAARLPDYMVPSAFVALDRMPLGPTGKLDRSALPEPEFVGEGYREPRTEAEAIIT | |
| | VAYADVLGVERVGIDDDFFAVGGDSLRSIQVVARARARGLDLTTREIFECRTAAR | |
| | LAEVASARQDRAPALAELEGGGVGPMPLQPVARQVFEHGGGMNRFAMSMVLELPA | |
| | GIDERGLAATLDAVLDRHDLLRARLVRGDEFSLVAQPQGSVRAADLIRRVGCDGR | |
| | WDDPSSLEAAKAELDDAVGRLDPEAGTMADFVWFAPEAGTGRLLVVLHHLVVDGV | |
| | SWRILMSDFAEAWQQVRAGRTPELPAVGTSARRWASALEDEALSAEREAELAYWR | |
| | DLLEVPDPALGTRVFDPAVDVMSTVDTVRVQVPADVTEAVLTRLPAAFKGTGTDV | |
| | LLAALALAVNRWRGADRSALVRLEGHGREEDVVPGADLSRTVGWFTSMYPVRVDV | |
| | (SEQ ID NO: 8) | |
| aztN10 | EVWPQAPGQSGIQFEAALADGSFDVYHMQFVLHLSGHVDPERMRSAGQALLDRYP | SEQ ID |
| (module | NLRSAFLAAAGGDPVQVVADHVALPWRHIDLTGRAAAEQDAALDQALADDRADRL | NO: 3 |
| 2) | DPGKPPLMRLALLTCGPRQAKLIITAHHTLFDGWSSPLVIKDLIRLYSTAGGLGP | |
| | VRGYGDYLTWLSTRDRKASAAQWAAELTGFDQPTLVAPNAPVQEAASALGRVEVP | |
| | LSIDKGRELARRAAELGVTLNTLLQGAWGILLSKLTGRQDVVEGAAVNGRPAELA | |
| | GSDEMVGLFINTLPTRASCRPDHSVAQVITDLQNRQTALLDHHYYGLADIQRDVG | |
| | LPALFDTIVVFENYPIDRAGIVDANTAAGFTIDAIRPFAGSHYPLTLNASDPYLR | |
| | TSLDYQNNLYDREAAELIAARLVRVLDQVLDDPTVPVGAVEVLSREEWDRLVRRV | |
| | NDTARPVAADTLPGAFEAQVARDPDRVALIGERERLTYGEFDRRANQLAHWLVEQ | |
| | GAGPEQLVAVRIPRSVDLMVAIYAVVKAGAAYVPLDTELPEDRVRHVLDSAEPLL | |
| | VLDGTLPDVSAYPTTNPERVLSPDNAAYVIFTSGSTGGPKGVQVSHRSIMNRLKW | |
| | GLAHFDVGTEDRVLLSTSASFDVSVPELFAPLQVGAAVVIARPDGRRDPSYLAEL | |
| | IRRERVTGADFVPSLLEAFAGEPAAKRCDSLRWIEVAGEAFPAALANKVVDLLPD | |
| | CGVHNLYGPTEAAVEVTAWQHVPGADRVPIGAPVWNTQVYVLDAALRPVAPGVAG | |
| | ELYLAGAGLARGYLGRSALTANRFVACPFGPAGARMYRTGDLVRWNEDGQVEYIG | |
| | RTDFQVKVRGFRIELSEVESALTAHPDVDNAVVVVREDRADDQRLVAYVVPGGGR | |
| | ADPSGLDLAALTDLVRGRLPEYMVPSAIVPLAAFPTTASGKLDRKALPAPDHTEA | |
| | TAGRGPRNHHEEVLCRLFAELLGVEEIGIDVDFFDHGGHSLLATRLIGRIRSEFD | |
| | ADVKVTTVFRHPTVAQLAEQIQK (SEQ ID NO: 9) | |
| Azt010 | IPLSFAQSRMWILHKLEGPSATYNVPFVLRLEGVLDTTALATAVTDVTNRHESLR | SEQ ID |
| (module | TLVVEDAGGTASQRIVTPEEAVFPFRVVDVAADAVDAAMHEVACEPFDLDTELPL | NO: 4 |
| 3) | RTTVLRIAPQEHVLVFVFHHIAADGASVAPFVRDLVSAYTARHRGSAPQWTPLPV | |
| | QYKDYTLWQRQLLGDETDPESTAAEQIAYWKKELAEVPQPLQLPLDRPRPTAASH | |
| | RGGEVPFVLAPELLSGVQKLAADHGATAPMVAQAALAVLLHKLGAGEDVPIGSPI | |
| | EGRGDEQLDDLIGFFVNTWVLRADLSRNPSFADLLEQVRDKALAAYDNQDIPFER | |
| | LVELLNPDRTTAYMPLFQTALGWQFVWGEIEMPGLRVTPIPVGTGTAKFDLLENI | |
| | VPNASGGTRGLLEYATDLFDHTTAERIVDRFVRILEQVLEDPAVPVGAIEVLSAQ | |
| | EQDWLLRGATDTALSVPERTVDALFSERAAATPDAVALVCGDVTLTYREVDERAN | |
| | RLARVLTERGVEPESVVAVVVSRSPQWVVALLGVMKAGGAYLPVDPAYPAERVAF | |
| | MVADSGAVLVIGDAVSAGQVPELSAPMIRLDDPDVVAALAGADPGPVTDADRRGP | |
| | VAVANTAYVIYTSGSTGTPKGVAVSHSGVASLAASQAERLAVTPDSRVLQFASPS | |
| | FDASLWEWSMALLTGAALVLAGPDELAAGDPLIETIAAHGVTHATLPPVVLAALP | |
| | TGALPSVETLVVGGSASSPELVAQWSAGRRMINGYGPTEITVCAAMSTAMVGDGR | |
| | TPPIGRPIANTQAYVLDTALRPVAPGVAGELYIAGPGLARGYLGRTGLTADREVA | |
| | CPFGAPGTRMYRSGDLVRWNQDGELEYLGRTDFQVKIRGFRIELGEIEHALTMHP | |
| | GVAQAAVVVNENQLGDKQLVGYLVPKPYAAAVAGADAQVDEWRHLYDDSYADSSD | |
| | EELGEDFQGWNSSYTGEPIPREQMLEWQDAAVAQVLRFEPRRVLEIGVGSGLLLA | |
| | KIVDEVEEYWGTDISATVVDRVRAQAAEAGYGDRVRVSAQPADDMSGLPRGRFDT | |
| | VVLNSVVQYFPSVEYLDQVLRQVMELLVAGGRVIVGDVRNAATRTLMQTAVQRTA | |
| | HPHASHDELRTLVKRELLAERELAIAPEWFTEWAGDDSVAVDIRLKPGQAHNELT | |
| | RHRYEVVLYKRPADVLDLAGVPSVPWGREVHDLADLGRCADRAGGPVRVTGIPNA | |
| | RLAEEAALTVATGLLDPAPRSGEPVDPQELLQWARKDDRDVVLTWSGEDTRCFDA | |
| | VLLPERRTGQPHVSGSFVPSGAGGRVRANNPALARSIGPLLIELPEYLRERLPDY | |
| | MVPPALVPLSELPLTPNGKLNHRALPAPDYGQAATGRAPRNQVEETLSALFAEVL | |
| | GVDNVGIDNDFFATGGDSIRSIQIVARARARGIEVSTREIFEHRTVARLADLVEG | |
| | REEERLTLAELPGGGVGWAPLMPTAKHVLALGGGLGRLCMSMMLTLPEGIDRAGL | |
| | VATVQTVLDRHDVLRSRLDRTRQGLSIEPAGSVDAGALLREVRYGDADAHAELDA | |
| | AADRLDPDAGVMAQFVWFTSDTDTDADRLLIVLHHLVVDGVSWRLLLPDLVSAWK | |
| | QVRDGRTPEPAGPGTSLRRWAHALADEAARPERVAELPVWRQILRGDEPVLGARE | |
| | LDPARDVAATVETVRVHVPADVTETVLTKVPAVFRGGVDDGLLAALALALTRWRR | |
| | TRGVPASSALVRLEGHGREEEAVPGADLSRTIGWFTTMYPVRLDLA (SEQ ID | |
| | NO: 10) | |
| Azt010 | LAEVWPVTSAQSGILFHSMLAGSSFDAYHVQLVFHISGDVDPERMSRAGQMLLER | SEQ ID |
| (module | HTSLRAAFVDGADGDLVQVVPAAGVTLPWRYLDLTGYGEAERTETFERFLAQDQA | NO: 5 |
| 4) | AHFDVGTPPLIRLALVALEPGRAELVMTVHHSLADGWSSPLLLQDLLLLYASHGD | |
| | AAGLPGTRSYGEFLAWRARQDQDEAARAWAAELDGVDEPTLLAPGATGGDGLDQV | |
| | EVALPLDLSGELNRCASVLGVTINTLVQGAWALLLGQLTGRQDLVFGATVSGRPP | |
| | AVTDVETMVGMFINTLPVRVEYAPGDTLAEVLTRLQSRQAGLVEHHYYGLTEIQQ | |
| | SVGLQNLFDTLVVFESYPVDRDGLSSATDAADGIAITGLRPSNGTHYPLALMAAV | |
| | DTHLQFLLQYTPGVFDRDTVEAYAARFVRILEQLAATPELKTAQLDVLEPAERDR | |
| | LLVEFNDTAVPTPDVSVNALVEAQAARTPDEVAVVAEGESLTYREVNARADRLAC | |
| | ELAARGVGPESMVAVSLPRSADLVVALLAVLKAGGTHLPVDPRYPSHRLAAIFEE | |
| | ARPHLVLTDQATVGVLPEHDAPDVLLGSLDLSGDVTGLEIPSHADQLAYVMYTSG | |
| | STGKPKGVAITHGCVVNAVLRLAPIVGMEPGKRLLAAASVNFDISVFEIFTTLAT | |
| | GGVVDVVQDVLVLGDRKGWSGSVIHTVPSAFAELVDDIADRTSVETLVFAGEALP | |
| | SSLVEKTRDAFPGVRIVNAYGQTESFYATTFTVDGERPVSAGSAPAGAPLGNNRA | |
| | YVLGPGLTPVPPGAVGEIYIGGNVARGYHGRAALTAERFVPDPFGPTGARMYRTG | |
| | DLGRFNGEGQLEYVGRGDAQVKVRGFRVEPAEVEAALSAHPGVAQTAVIARDGRS | |
| | TGKQLVAYVVPAVTGDSTTTGDPRGPETKELHDFVAERLPDFMVPSAFVVLDRLP | |
| | LATNGKLDRAALPEPEYTGAAYRAPRTAREESLAALFAEVLGVDRVGIDDGFFEL | |
| | GGHSLLATRLISRARAEMGIEIPIRKIFDLPTVAALAAWSEE (SEQ ID NO: | |
| | 11) | |
| aztP10 | IPLSFAQRRMWILHQMEGGSENWNMPAAFRLTGALDQAALTAAIRDVVDRHETLR | SEQ ID |
| (module | TVYETNDDGELYQRILPTAEATPEVPVIEVAPGDVSGTIEEAFGYREDLAAEPPL | NO: 6 |
| 5 | QVRLFRCSPQEHVLVLVIHHIATDGSSVAPLVRDLAAAYTARRDGRAPAWEPLPV | |
| | QYKDYTMWQRELLGDVADPDSLAAAQVAYWRKELAGVPQPLNLPLDRPRPVQASG | |
| | RGSTVGLMVEPEVASGLQKLADERGATMSMVLHAALAVLLRKLGGGDDVTIGSSI | |
| | AGRTEEALADLVGFFVNTQVLRVDLCGDPSFTDLLAQVRHKSLAAYEHQDVPFDM | |
| | LVEAINPERSAAYQPLFQVMLGLQNYERPELELAGLTLEVEQTIPSTSKVDLFEN | |
| | MIVDDSGALRGDISYATDVFDRETVEAFGARFVRVLEQLVGDPGMCVGDVDVLSP | |
| | GERQRLVVEVNDTAEPTLELVEAVRRQVRATPEALAVIGEEESLTYQELEARSNR | |
| | LAHWLADLGVRAESRVAVCLPRTVNLVVALLAVIKAGGAYVPIDPEHPRSRIDYI | |
| | LEHADPLLVLDAEALAGVDWPAYPDAAPEVVVRPENAQYVIYTSGSTGKPKGVAI | |
| | PRGAVANYLATTQRRFPLSSADRMLFSTTVAFDMANTELYLPFTAGATMVMAGKD | |
| | TVTDPSAVLELIRRHGVTAVQATPAFWQMLLMHDPNAAKGLRIIIGAEAVPVRLA | |
| | ETLAKQAAEVENMYGPTETVTWCTEARVEVGQGAPIGRPVGNTQVYVLDSRLSPV | |
| | SRGVPGELYIAGAGMARGYQGRPELTAERFVACPFGPAGARMYRTGDLVRWDGNG | |
| | QLEYLERTDFQVKIRGFRIELGEIEHVLTGHPGVAQAAAVVRENQDGDKRIVGYV | |
| | IPEPDASQADGGVQALLAELPAYLRGRLPDYMMPSTLIPLSEVPLTPNGKLDRGA | |
| | LPSEDINAAVSREPRNSHEERMCALFGELLGIERVGIDDDFFELGGHSLLATRLS | |
| | ARIRGEFDIEMPLRTIIKYPTAGELAALLLVTTPAESSDPLAVVLPLNSDPGTGK | |
| | PPLWFFHGGGGLGWTYFSFASYVPDWPAYALQARGSDGVDKLAGSVKEMVEDYVT | |
| | EMLKIQPEGPFHLIGWSYGGTVVQAVAEALDRRGHEIAFVAILDSQPGGHGFTEI | |
| | HAGKALPDYRSELEEFFGQYIGTDNRQDFLDAMAKVLANNHTLMMDFESPVYRGD | |
| | VLFFSATLQERSYAHLWRPYVLGSIEVHDVRATHHEMNMPAAVAEVMEVIKRKL | |
| | (SEQ ID NO: 12) | |
| aztAG10 | MISVRSFGASSAHKGLWRAQEMFPDTLNHALTLWNVDGELDAAVMESAFLHVMGE | SEQ ID |
| (module | AEVLRVTFVDDGDGLRLVPRELGDWRPFFLDTGAEDDPEQAAREALADMVRQPED | NO: 7 |
| 6) | LERDLLFRLGVVRLAAARSVLVIIYHHLISDGFGAAGLLSRRLAEVYTALSRGAD | |
| | VPELPHPWDAESFATEAAQYSASEQFAEDTEFWRDYLADAPAPARIPRVALSDAM | |
| | RSALSEPMGSADRWGELTEPIGMVSRTLTVPHADAQAWTEAAKSMGVWMSSMLTA | |
| | AAAVFLRHRCDRPEFLLSLAVANRVGAASRTPGLAVNVVPVRVKVPLGATFTEIA | |
| | DAIGDETYEIFDHAACHYSEIQRASGTVLNDRGSFGAVVNVVEFAERLRFADSPA | |
| | HFLGGTTGTFEELAIGVYTDGTADSDLFIRLDAPASLYSRAELRFIGEDLIAHIR | |
| | AVVAADEQPVGALDVVSGAERDRVLTAPNDTNVPVPGLRVPELFARQVDRAPDAV | |
| | AVVSGDSAVSYRELDERSSRLAGALRQRQVGPETVVAVALPRSVDLVVALLGVVK | |
| | AGGAYLPVDPTFPAARIAPVARDASVRALLTDMATAEALSGDLDVPAILEDDIRP | |
| | DTAADSDAATEVPLPSRQDGLLAVMYGSGPTGAATGVAVTHRNMERFALDRRWRE | |
| | GGRDTVLWHAPHTSDALPLEVWVPLLNGGRVVVAPPGELDIDALTEVRAAHEIST | |
| | VWLPAGLFSAIAAERPERLAGLREVWTGGERVSAAAVRRVREACPELTVVTGHGP | |
| | TETTVFAASHRMAADEPVHHAGAVGRPMDHTALYVLGPGLAPVPVGVAGELYVAG | |
| | PGVTRGCPGRPGPTAERFVPCPFGPAGARMYRTGDRVRWSTDGLLEYVGRAGARA | |
| | DVRGTRVELAEVEEALSEHTSLARSVVVVSEDTSGQQRLVAYVVPVGGRTVAGDE | |
| | LRRFAAGRLPEFMVPSVFVVMERLPLTAGGRVDRYSLPEPTFDDDKYRAPRDHTE | |
| | RVLAEAFADVLELDRVGIDDDFFDHGGNSLRAIRLTGLIRAELNQEVPIRTLFAA | |
| | RTIAGLSDSWKELARSSRPTLRRRTKEGEAL (SEQ ID NO: 13) | |

[0172] In some embodiments, the biosynthetic gene cluster comprises a sequence encoding one or more NRPS modules. In some embodiments, the sequence encoding the NRPS module is selected from the group consisting of SEQ ID NOS: 2-7, or a sequence having at least 80%, at least 81%, at least 82%, at least 83%, at least 84%, at least 85%, at least 86%, at least 87%, at least 88%, at least 89%, at least 90%, at least 91%, at least 92%, at least 93%, at least 94%, at least 95%, at least 96%, at least 97%, at least 98%, or at least 99% identity thereto. In some embodiments, the sequence encoding the NRPS module comprises, or consisting essentially of, a sequence selected from the group consisting of SEQ ID NOS: 2-7.

[0173] In some embodiments, the biosynthetic gene cluster comprises sequences encoding six NRPS modules. In some embodiments, the sequences encoding the six NRPS modules comprise sequences of SEQ ID NOS: 2-7, or sequences having at least 80%, at least 81%, at least 82%, at least 83%, at least 84%, at least 85%, at least 86%, at least 87%, at least 88%, at least 89%, at least 90%, at least 91%, at least 92%, at least 93%, at least 94%, at least 95%, at least 96%, at least 97%, at least 98%, or at least 99% identity thereto. In some embodiments, the sequences encoding six NRPS modules comprise sequences of SEQ ID NOS: 2-7.

[0174] In some embodiments, biosynthetic gene cluster comprises one or NRPS modules comprising a sequence selected from the group consisting of SEQ ID NOS: 8-13, or a sequence having at least 90%, at least 91%, at least 92%, at least 93%, at least 94%, at least 95%, at least 96%, at least 97%, at least 98%, or at least 99% identity thereto. In some embodiments, biosynthetic gene cluster comprises one or NRPS modules comprising a sequence selected from the group consisting of SEQ ID NOS: 8-13. In some embodiments, biosynthetic gene cluster comprises six NRPS modules comprising sequences of SEQ ID NOS: 8-13, or sequences having at least 80%, at least 81%, at least 82%, at least 83%, at least 84%, at least 85%, at least 86%, at least 87%, at least 88%, at least 89%, at least 90%, at least 91%, at least 92%, at least 93%, at least 94%, at least 95%, at least 96%, at least 97%, at least 98%, or at least 99% identity thereto. In some embodiments, biosynthetic gene cluster comprises six NRPS modules comprising sequences of SEQ ID NOS: 8-13.

[0175] In some embodiments, the six NRPS modules are organized in 1, 2, 3, 4, 5 or 6 open reading frames. In some embodiments, the open reading frames comprise sequences selected from the group consisting of SEQ ID NOS: 14-17, or sequences having at least 80%, at least 81%, at least 82%, at least 83%, at least 84%, at least 85%, at least 86%, at least 87%, at least 88%, at least 89%, at least 90%, at least 91%, at least 92%, at least 93%, at least 94%, at least 95%, at least 96%, at least 97%, at least 98%, or at least 99% identity thereto. In some embodiments, the six NRPS modules are organized in 4 open reading frames. In some embodiments, the six NRPS modules are encoded by sequences comprising a first NRPS open reading frame of SEQ ID NO:14, a second NRPS open reading frame of SEQ ID NO: 15, a third NRPS open reading frame of SEQ ID NO: 16 and a fourth NRPS open reading frame of SEQ ID NO: 17, or sequences having at least 90%, at least 95%, at least 97% or at least 99% identity thereto. In some embodiments, the six NRPS modules are encoded by sequences comprising SEQ ID NOS: 14-17.

[0176] In some embodiments, the biosynthetic gene cluster comprises one or more genes that contribute to the production of at least a portion of the compound of Formula (I) when the biosynthetic gene cluster is expressed by a host cell. In some embodiments, the one or more genes comprise at least one polyketide synthase (PKS) module.

[0177] In some embodiments, the one or more genes comprise at least one PKS module. In some embodiments, the one or more genes comprise at least 1, 2, 3, 4 or more PKS modules. In some embodiments, the one or more genes comprise four PKS modules. Sequences of representative PKS modules are described in Table 2, below.

TABLE 2
PKS Modules

| | | DNA |
|---|---|---|
| Name | Amino Acid Sequence | Sequence |
| AztAD10 | IAVVGMSCRLPKARNPLAFWELLRDGRSGITDVPADRWDAHRLLAADVT | SEQ ID |
| (module 1) | APGKVTTTRGGFLDDIAGFDADFFGIAPNEAAMMDPQQRLMLELGWEAL | NO: 18 |
| | EDAGIVPEHLAGTRTGVFVGAIWDDYAVRLYKHGTRRIDRHSVTGLHRS | |
| | IIANRLSYTLGLNGPSLAVDAAQSSSLVSVHLAAESLRAGECTLALAGG | |
| | VNLTIVPESTIGSTKFGGLSPDGLCKTFDARANGYVRGEGGAYLALKTL | |
| | SRAVADGDRIYCVIEGSAVNNDGATPGLTVPSARAQEEVIRRAHDRAGT | |
| | RPEDVQYVELHGTGTRVGDPIEAAALGAALGTGRPADAPLHVGSAKTNV | |
| | GHLEGAAGIVGLLKTILSIWHRELPPSLNFETPNPDIAFDELRLRVQQD | |
| | LTSWPRPDRPLIAGTSSFGMGGTNCHVVLREWTVDDCASVQDGPAVVTD | |
| | GTVPWLVSAKSRAALEEQARRLLDHLDRHPRETPAEVGHALAVGRSVED | |
| | HRAVVVGREPADERGALSALAEGEPSAQVVTGAVAARPGKTVFVFPGQG | |
| | SQWVGMGVELMASSPVFAEHLTACAAALEPYTGWNLIDVLAQAQGAPAL | |
| | EGDDVIQPALWAVMISLARLWEHLGITPDAVVGHSQGEIAAAHIAGVLS | |
| | LEDSARIVALRSQALVQIAGHGGMVSLPLPLADASELIGRWEGRLVVAT | |
| | VNGPSATVVAGDTDAVEELRAHCEKEGFRARRVPIDYASHTSHVHPLRD | |
| | RLLDVLAPIEPREASIAFYSTVAGHLGGPMADATVMDARYWYDNLATAV | |
| | HFQAATSALLDDGHTLFIEASPHPVLTHPLQETVEDHASGGEVVVTGTL | |
| | RRDDGTWQRVLTSLATVHTHTIAPVDWSGFFPATRPTHLDLPTYPFQRR | |
| | RHWIDLPTDGVADADSDASVDVVADVVADRPEDTAPPAESGASSPLLDR | |
| | LRKASRTQREQILTDRIRAEVAAITGRVTSETVDGDRTFKDFGFDSFAS | |
| | VELRNRLSALTGLKLPTTLLENHPTPTAVARYLRTEL (SEQ ID NO: | |
| | 22) | |
| AztAD10 | IAIVGMACRYPGDVRAPEDLWRLVSEGVDAITDFPADRGWDTEKLLDPD | SEQ ID |
| (module 2) | PDRPGTSYVTKGGFLSEAAAFDPAFFGIGPREATAMDPQQRLLLETSWE | NO: 19 |
| | AIEQAGIDPAALRGSQTGVFVGAMTQEYGPHLHDGVAGFDGYLLTGNTA | |
| | SVASGRISYTLGLQGPAVTVDTACSSSLVSMHMAAQALRNGECSLALAG | |
| | GVAVMATPGMFVEFSRQRGLAADGRCKAFAEAADGTAWAEGVGLLLLER | |
| | LSDARRNGHQVLAVVRGSAINQDGASNGLTAPNGPSQERVIRQALAGAG | |
| | LSAQEVDVVEAHGTGTALGDPIEAQALIATYGKDRPEDRPLWLGSLKSN | |
| | IGHSQAAAGVGGVIKMVMAMRHGVLPQTLHVDQPSSHVDWAEGAVELLT | |
| | ENRTWPESDHPRRAAISSFGISGTNAHLIVEQAPEGEGAAGEGVPEPVV | |
| | VTDGTVPWLVSAKSRAALEEQARRLLDHLDRHPEATPVEIGHALAASRS | |
| | VFDHRAVLVGREPDDERGALTALAAGEPSARVVAGTAAAQPGRTVFVEP | |
| | GQGSQWAGMGVELMRTSPVFAEHLTACAAALEPHTGWNLVDVLAQEQGA | |
| | PALEGDAVIQPALWAVMISLARLWEHLGITPDAVVGHSQGEIAAAHIAG | |
| | VLSLEDSARIVALRSQALVQIAGRSGMVSLPLPSAGASELIGRWEGRLV | |
| | VATVNGPSATVVAGDIAAVEELLAHCESEGLRARRVPIDYASHTSHVHP | |
| | LREQLLDTLASVEARAATVAFYSTVAGHLGGPMADTTVMDAEYWYDNLA | |
| | TAVHFQAATSALLDDGHTLFIEVSPHPVLTHPLQETAEDHPTGERTLVT | |
| | GTLRRDDGTWQRVLTALATAHTHTTTPVGWSDFFPATRPTHLDLPTYPF | |
| | QHQRYWLERPESAGDAAAAGQVGVEHPLLGAAVELAGTDVTVLTGRLSL | |
| | QTHGWLADHTISGTVLLPGTAFVEMALRAGDEVGVDHLEELALQAPLVL | |
| | PATGGVQLRVEAGELDDTGRRSVSVYSRPDGQGTGVPWTCHATGVLATS | |
| | GPAPSSWDPRVWPPAGAVPVETDELYPSLAVLGYQYGPAFQGVRTVWKR | |
| | GDEVYAEVVLPQERHAEVAAFGIHPALLDAALHAGLVPDPVAGWEPEPP | |
| | RLPFVWSDVRLHATDATNVRVRLAPAGHDALVLEVADTEGAPVASVGSL | |
| | MMRPADPAKLGGARDGHHDALFRMEWVSRAVRVADGTPVGPWALVGDDG | |
| | LGLGTVLDAAQMRRYADLTALTGEFEELATTDSADTFDDSRPELVLFCH | |
| | LPGEGAASGDPAAARVELFKALSLVRSWLADERFAGTRLAVVTRGAVAA | |
| | DDAEQPDLASAPVWGLLRTAQTENPDRFVLVDVDEDERSLRALPAALAC | |
| | GEPQFAVRGGEVLVPRLVRAGSAADGAPTPPRERAVGRPDATMPSVWDP | |
| | EGTVLITGGTGTLGGRFARHLVTEYGVRRLLLVSRRGPGAEGAAELVER | |
| | LAGLGATATAVACDVSDPEALSGLLEAIPAEHPLTAVVHTAGVLDDGLV | |
| | SALTPERMDAVLRPKADAAWHLHRLTQGRDLRAFVLFSSVMGALGGAGQ | |
| | GNYAAANVYLDALAALRRAQGLPATSLAWGFWDERSELTGDLDQADLAR | |
| | MARAGLVPLRSDEGLALFDTALALGEPTLVPARLDTTRLAKDGNGPLPA | |
| | VLGALVRPRAARRTAAAGSAGGATGGQRFAGMSAADAERELMEAVRAHT | |
| | ATVLGHATPEAVRPDSRFKDIGFDSLSSVELRNRLSAAFGLRLPATAVF | |
| | DHPTPATMARHLRGEL (SEQ ID NO: 23) | |
| AztAD10 | VAIVGMGCRLPGGVTSPEELWELVASGSHGISGLPTDRGWDVDGLYDPD | SEQ ID |
| (module 3) | PDRRGKSYVREAGFLYDAGEFDADFFGIAPREALAMDPQQRLLLETTWE | NO: 20 |
| | AFERAGIRPESVHGSRTGVFVGAMPQEYGPHLHDATEGLDGLLLTGNTT | |
| | SVLSGRLAYFLGLEGPALTIDTACSSSLVALHQAAHALRQGECTLAVAG | |
| | GVAVMATPGVLTEFSRQRALAPDGRIKSFAASADGTGWSEGVGILLLER | |
| | LSDARKNGHQVLAVVRGSAVNQDGASNGLTAPNGPSQERVIRQALANAR | |
| | LTPDEVDVVEAHGTGTKLGDPIEAQALIATYGQNRPEDRPLWLGSLKSN | |
| | IGHSMAAAGVSGVIKMVMALRHGVLPRTLNVDEPTPHVDWPAGAVELLT | |
| | EERSWPDPGRPRRAAVSSFGISGTNAHLIVEQAPEDTGVTREGVPEPEV | |
| | VTDGTVPWLVSAKSEAALAEQARRLLDHLDRHPGVTPAEVGHTLAASRS | |
| | VFDHRAVLIGRELADHRGALTALAAGEPSARVVTGTVAAQPGRTVFVFP | |
| | GQGSQWAGMGVELMRTSPVFAEHLTACAAALEPHTGWSLIDVLDQTQGA | |
| | PDLDRVDVIQPALWAMMISLARLWEHLGITPDAVVGHSQGEIAAAHIAG | |
| | VLSLEDSARIVALRSRAITHIAGDGGMVSLPLAVADAEELIARWEERVV | |
| | VAAVNGPSATVVAGDADALAEIVTHCEGEDIRARKIPVDYASHSPHVEA | |
| | LHDELLELLAPVRPREAEVAFYSTVGDHAKGAMSDTTAMGAAYWYENLR | |
| | TTVAFEAAARALLDDGHTLFVEVSPHPVLTHPLQETVEDHTGAGEVAVT | |
| | GTLRRDDDTWQRVLTALATAHTHTTAPVDWSGFFPATRPTHLDLPTYPF | |
| | QHQHYWIQQTTTATDPHTLGLHAADHGLLGAAVALADGDGHVFTGHLSL | |
| | RSHPWLADHAVHDTSLLPGTAFVELALHAGQATDTPHLEDLTLEAPLTL | |
| | PATGGLHLQVHVAASDGDGHRALTIHSRPDDATPDLPWTRHANGTLAPQ | |
| | PSGAPDPAEWAELAAWPPAGATPVPAGTLYDHLADRGYRYGTTFQGLTA | |
| | VWRQGGALYAEVTLSDDTDNATAADHYGIHPALFDAALHPIVGAGPEQD | |
| | SDQVLLPFAWSNVQLHAVGARALRVQISPADAGTLRVRLADPTGQPVAE | |
| | AASLALRPITTEQLAKAVAAGGDDHLFRLAWTPASVTEELKTGRVAFLG | |
| | AAVPEALVTSLPGDVAVERHEKLAPLLADDTALLPDLVIATGLLERSHS | |
| | GEDVPGPAREAVQYALDLVQEWLAEERLAGSRLVFVTRRAVAVHADTES | |
| | PSPADAAVWGLIRTAEAENPGRFTLIDLADEKAIASESFRAALGSGEPQ | |
| | VAVRDGDQRLYVPRLVREVQPDDTAVPEPAAGGTVLITGGTGTLGTLFA | |
| | RHYATARQAGHLLLTSRRGPDAPGARELAAELTELGVKVTVVACDTADR | |
| | GALAALLAAVPDEHPLTAVVHTAGVLDDGTITSLTAERVERVFRPKVDA | |
| | AWHLHELTRESDLTEFVLFSSAAGVLGTPGQGNYAAANVELDALAERRR | |
| | ADGLPATSLAWGLWSDSSGMTGHLDDVDLTRMARLGIKPITAEEGVALF | |
| | EAARATGAACLVPAKIAPALLRPHLETGTLPAVLQGLVRAPVRKATVAT | |
| | ATDGATLRDRLAHLSPEEAEDTLATLVRTHVALVLGHDTSDTISLDKAF | |
| | KDLGFDSLTAVELRNRLASSTGLSLAATLVFSYPTPRELGRHLHDL | |
| | (SEQ ID NO: 24) | |
| AztAE10 | IAVVAMACRYPGGVSSPEELWNVVRDGLDVVGEFPQDRGWRDIFDPDPD | SEQ ID |
| (module 4) | TLGSSYTRHGGFLTDAAAFDAGFFGISPREALAVDPQQRLLLETSWEVE | NO: 21 |
| | ERAGIVPADVRGADVGVFSGVSSAEYGTRFVEASGHDLEGYLLQGSVLS | |
| | IASGRVAYEFGLTGPAVSVDTACSSSLVAVHLAMQSLRSGESSLALAGG | |
| | AAVMATPALFVEFSRQRGLSADGRCRSFADAADGTGWAEGVGVLLLERL | |
| | SDARRNGHPVLAVLRGSAVNQDGASNGLTAPNGRAQEKVIRKALANAGV | |
| | SAAEVDLLEAHGTGTTLGDPIEAGALLATYGQGRAEGRPLRLGSLKSNI | |
| | GHSMAAAGVGGVIKAVMAMRHRYLPKTLHVDQPSRHVDWSSGALELLLE | |
| | GREWTRAGGPRRAAVSSFGVSGTNAHVILEEAPRQEQADEGDPDSGVVG | |
| | GLVPWALSGKSAAAVQQQARKLREFAVADPGLDVADVGWSLTSSRTRFG | |
| | HRAVVLGHDRDELLSGLTALAAGEESAAVVRGTARELGGTVFMFPGQGS | |
| | QWVGMGRQLYDTFPVFAQSLDACAAALAEWVDWSLLDVVRGVEGAPTLD | |
| | RVDVVQPALFSVMVSMAALWRSWGVEPAAVVGHSQGEIAAAHVCGALSL | |
| | RDAAKVVALRSKALVDLIGHGGMASVAESADVVAERLAPWSDRVSIAVV | |
| | NGPRSVVVSGEPDALDEFVEKMKAEGAQARRIKVDYASHSHHVARVRDQ | |
| | VLGPLSDMSPKTSTLPFYSTLYGEVIDTAQLNGDYWYTNLREKVVFETS | |
| | VRRLADDGFRVFIEMSPHPVLTVPVQEIVEDVDDAVVLSSSRRDRGEVE | |
| | AVLGSLAGLHVQGGSVDWDVLFGTRRRVDLPTYAFQRQRYWLNSVHTGV | |
| | TAEVSALEPPAADDDPVALPDLIADLSDDEATALVLDHVLTKVAVVLGH | |
| | PSSEAVDPDQEFKDIGFDSLLSVQLSKGLATTTGLKLRPNLVLRHPTPR | |
| | RVAGYLKTS (SEQ ID NO: 25) | |

[0178] Polyketide synthases (PKS) are a family of multi-domain enzymes or enzyme complexes that produce polyketides, a large class of secondary metabolites, in bacteria, fungi, plants, and a few animal lineages. PKS genes for an individual polyketide are usually organized in single operon or in gene cluster. PKSs can be classified into three groups: Type I, Type II and Type II. Type I polyketide synthases are large, highly modular proteins, Type II polyketide synthases are aggregates of monofunctional proteins, and Type III polyketide synthases do not use Acyl carrier protein (ACP) domains. All Types of PKSs, and modules thereof, capable of contributing to the production of the compound of Formula (I) are envisaged as within the scope of the instant disclosure.

[0179] Type I polyketide-synthase modules comprise several domains with defined functions, separated by short spacer regions. An exemplary, but non-limiting Type I PKS protein comprises, from N to C terminus, a starting or loading module comprising an Acyltransferase (AT) and Acyl carrier protein (ACP) domain, an elongation or extending module comprising Keto-synthase (KS), AT, Dehydratase (DH), Enoylreductase (ER) and Ketoreductase (KR) domains, and a termination or releasing domain or module comprising a Thioesterase. As the polyketide is synthesized, the nascent polyketide chain is passed from one thiol group to the next by trans-acylation reactions, and is released at the end by hydrolysis or cyclization. At the start, the starter group, for example acetyl-CoA or an analogue thereof, is loaded onto the ACP domain of the starter module in a reaction catalyzed by the starter module's AT domain. In the polyketide elongation stages, the nascent polyketide chain is passed from the ACP domain of the previous module to the KS domain of the current module, in a reaction catalyzed by the KS domain. The elongation group, usually malonyl-CoA or methylmalonyl-CoA, is loaded onto the current ACP domain in a reaction catalyzed by the current AT domain. The ACP-bound elongation group reacts in a Claisen condensation with the KS-bound polyketide chain under CO2 evolution, leaving a free KS domain and an ACP-bound elongated polyketide chain. The reaction takes place at the KSn-bound end of the chain, so that the chain moves out one position and the elongation group becomes the new bound group. In some cases, the fragment of the polyketide chain can be altered stepwise by additional domains. This cycle is repeated for each elongation module, until finally the TE domain hydrolyzes the completed polyketide chain from the ACP-domain of the previous module.

[0180] In some embodiments, the biosynthetic gene cluster comprises a sequence encoding one or more PKS modules. In some embodiments, the sequence encoding the PKS module is selected from the group consisting of SEQ ID NOS: 18-21, or a sequence having at least 80%, at least 81%, at least 82%, at least 83%, at least 84%, at least 85%, at least 86%, at least 87%, at least 88%, at least 89%, at least 90%, at least 91%, at least 92%, at least 93%, at least 94%, at least 95%, at least 96%, at least 97%, at least 98%, or at least 99% identity thereto. In some embodiments, the sequence encoding the PKS module comprises, or consisting essentially of, a sequence selected from the group consisting of SEQ ID NOS: 18-21.

[0181] In some embodiments, the biosynthetic gene cluster comprises sequences encoding four PKS modules. In some embodiments, the sequences encoding the four PKS modules comprise sequences of SEQ ID NOS: 18-21, or sequences having at least 80%, at least 81%, at least 82%, at least 83%, at least 84%, at least 85%, at least 86%, at least 87%, at least 88%, at least 89%, at least 90%, at least 91%, at least 92%, at least 93%, at least 94%, at least 95%, at least 96%, at least 97%, at least 98%, or at least 99% identity thereto. In some embodiments, the sequences encoding four PKS modules comprise sequences of SEQ ID NOS: 18-21.

[0182] In some embodiments, biosynthetic gene cluster comprises one or PKS modules comprising a sequence selected from the group consisting of SEQ ID NOS: 22-25, or a sequence having at least 90%, at least 95%, at least 97%, or at least 99% identity thereto. In some embodiments, biosynthetic gene cluster comprises one or PKS modules comprising a sequence selected from the group consisting of SEQ ID NOS: 22-25. In some embodiments, biosynthetic gene cluster comprises four PKS modules comprising sequences of SEQ ID NOS: 22-25, or sequences having at least 80%, at least 81%, at least 82%, at least 83%, at least 84%, at least 85%, at least 86%, at least 87%, at least 88%, at least 89%, at least 90%, at least 91%, at least 92%, at least 93%, at least 94%, at least 95%, at least 96%, at least 97%, at least 98%, or at least 99% identity thereto. In some embodiments, biosynthetic gene cluster comprises four PKS modules comprising sequences of SEQ ID NOS: 22-25.

[0183] In some embodiments, the four PKS modules are organized in 1, 2, 3 or 4 open reading frames. In some embodiments, the open reading frames comprise sequences selected from the group consisting of SEQ ID NOS: 26 and 27, or sequences having at least 80%, at least 81%, at least 82%, at least 83%, at least 84%, at least 85%, at least 86%, at least 87%, at least 88%, at least 89%, at least 90%, at least 91%, at least 92%, at least 93%, at least 94%, at least 95%, at least 96%, at least 97%, at least 98%, or at least 99% identity thereto. In some embodiments, the four KPS modules are organized in two open reading frames. In some embodiments, the four KPS modules are encoded by sequences comprising a first KPS open reading frame of SEQ ID NO:26, and a second KPS open reading frame of SEQ ID NO: 27, or sequences having at least 90%, at least 95%, at least 97% or at least 99% identity thereto. In some embodiments, the four KPS modules are encoded by sequences comprising SEQ ID NOS: 26-27.

[0184] The biosynthetic gene cluster of the disclosure can comprise additional genes involved in the production of the compound of Formula (I), in addition to genes encoding NRPS and KPS proteins or modules. For example, the biosynthetic gene cluster can include genes that regulate the expression of other genes in the cluster, such as NRPS and KPS encoding genes, genes involved in the synthesis of precursor compounds that are involved in the synthesis of the compound of Formula (I), and genes involved the transport of same.

[0185] In some embodiments, the biosynthetic gene cluster further comprises a sequence encoding a Streptomyces Antibiotic Regulatory Protein (SARP), sometimes referred to herein as the SARP-encoding gene. SARP-family regulators are transcription factors that are activators of biosynthesis pathways in streptomycetes and actinomycetes bacterial species, for example antibiotic biosynthesis. SARP genes are known to occur in various types of antibiotic gene clusters encoding, inter alia genes encoding for the synthesis of polyketides, non-ribosomally synthesized peptides, and beta-lactam antibiotics, where they can regulate expression of genes in the gene cluster. SARP proteins are characterized by winged helix-turn-helix DNA binding motif at the N-terminus that binds to a conserved recognition motif within the major groove of target DNA. An exemplary SARP recognition motif comprises direct heptameric repeat sequences followed by 4 bp spacers, which are often localized between the −10 and the −35 promoter element of the respective target DNA.

[0186] In some embodiments, the biosynthetic gene cluster comprises a SARP-encoding gene comprising a protein coding sequence of SEQ ID NO: 28, or a sequence having at least 90%, at least 95%, at least 97% or at least 99% identity thereto. In some embodiments, the biosynthetic gene cluster comprises a SARP-encoding gene comprising a protein coding sequence comprising, or consisting essentially of SEQ ID NO: 28.

[0187] In some embodiments, the biosynthetic gene cluster comprises a sequence encoding a SARP protein comprising a sequence of:

| (SEQ ID NO: 29) | |
|---|---|
| 1 | MLGPFEMRTD DGVWVDVPGA RLRGLLIALA LRPGQVVPKA SLVDWIWGEQ SPADATNALQ |
| 61 | RLVSRLRKAL PYGAVEGHTD GYRLIVEPDA VDAVRFERLV VASQARTENA SRRAQLLREA |
| 121 | LELWRGAAMQ DSGPQDSAAF DAAVVRLDGL RLTALEEWED AENTLGRGAE LVTELTDLVA |
| 181 | AHPLRERLVA ALMRALVAAG SDSQALLVYQ RAKEALADAL GVDPSPELSA LHVALLRGEL |
| 241 | GTRERNRKTN LRAELTSFIG KGADVAAVRE LIAEHRLTTV IGPGGAGKTR LAAETARAML |
| 301 | GDLPDGAWLV ELAAIGADGD VADVAQATLA GLGLRDALLG GAPNVELTDR LIAAIREREA |
| 361 | LLILDNCEHV VESAAVFAHR VLGECRRLRI LATSREPLGI TGEALWQADP LALPEPGASP |
| 421 | DEIESAPAVR LLRDRAGAVR RDLASDARTL ATMARVCRAL DGMPLAIELA AARLRTMSID |
| 481 | QLAHRLDDRF RLLTSGSRTA LPRHKTLRAL VDWSWELLTD AERLVLRRLS VFSGGASLDA |
| 541 | AERVCAGAAV EQEQVLELLT SLTEKSLLRA EGDSAPRYRM IGTIKEYAGQ RLAEAGEAEL |
| 601 | ARHAHLACFT ELAETAEPHL RRAEQLKWLA TLEAEHDNIG AAMRGALAAG EAQAAMRLAA |
| 661 | GAGWYWWLGG HRSEGLELIT AASRMPGEVA DEVRAVMYAL VVHFLSSGPG DEHQVAEWID |
| 721 | KAYRFSRHSR RSHPLMGFIA PLKRMLQGPD AFLPAFEPLL DDEDPWARAL ARLHLGKMRI |
| 781 | MLGQGGRDVD AHLERALAEF RAIGERFGIS FALTELADRI AARGEFTAAC EHYEQAIAVV |
| 841 | TEVGAIEDII QMRSRQAQLY WLLGDEDASA AAIAEAQRYA ERVAWPGALA VLALSKAELA |
| 901 | RWGGRPEEAR RQLGAATALL GDDAEQANIR AVTHDLLGYL ADDLGEARAY RAAACAAASE |
| 961 | AGHAPLIARA LVGVADLALR RDQPEQAARL LAASTSVRGL ADRSHTDVAR IEQTARRRLG |
| 1021 | DAGEVEAARE GTRTSWSQLV EVTLAS, |

or a sequence having at least 90%, at least 95%, at least 97% or at least 99% identity thereto. In some embodiments, the biosynthetic gene cluster comprises a sequence encoding a SARP protein comprising, or consisting essentially of SEQ ID NO: 29.

[0188] In some embodiments, the biosynthetic gene cluster comprises an mbtH gene. mbtH proteins are a family of small proteins encoded by genes found in many, but not all, non-ribosomal peptide synthetase-encoding gene clusters. Approximately 70 amino acids in length, mbtH proteins are named after mbtH contained in the gene cluster for the siderophore mycobactin in Mycobacterium tuberculosis, which codes for a 71-amino acid protein. Without wishing to be bound by theory, it is thought that mbtH genes are involved in the biosynthesis pathways of the gene clusters in which they reside.

[0189] In some embodiments, the biosynthetic gene cluster comprises an mbtH gene. In some embodiments the biosynthetic gene cluster comprises four NRPS open reading frames, and the mbtH gene us located upstream of the four NRPS open reading frames. In some embodiments, the mbtH gene comprises a coding sequence comprising a sequence of SEQ ID NO: 30, or a sequence having at least 90%, at least 95%, at least 97% or at least 99% identity thereto. In some embodiments, the mbtH coding sequence comprises, or consists essentially of, SEQ ID NO: 30. In some embodiments, the mbtH protein comprises a sequence of SEQ ID NO: 31, or a sequence having at least 90%, at least 95%, at least 97% or at least 99% identity thereto. In some embodiments, the mbtH protein comprises a sequence of SEQ ID NO: 31.

[0190] In some embodiments, the biosynthetic gene cluster comprises an ornithine monooxygenase gene, and two PKS open reading frames. In some embodiments, the ornithine monooxygenase gene is downstream of the second PKS open reading frame. In some embodiments, the ornithine monooxygenase gene comprises an ornithineN-monooxygenase. In some embodiments, the ornithine N-monooxygenase gene comprises a coding sequence of SEQ ID NO: 32, or a sequence having at least 90%, at least 95%, at least 97% or at least 99% identity thereto. In some embodiments, the ornithine N-monooxygenase gene comprises a coding sequence that comprises, or consists essentially of SEQ ID NO: 32.

[0191] In some embodiments, the biosynthetic gene cluster is a wild type biosynthetic gene cluster isolated or derived from Streptomyces griseochromogenes. In some embodiments, the biosynthetic gene cluster comprises 6 NRPS modules encoded by sequences comprising SEQ ID NOS: 2-7, and 4 KPS modules encoded by sequences comprising SEQ ID NOS: 18-21. In some embodiments, the 6 NRPS modules are arranged in 4 open reading frames comprising sequences of SEQ ID NOS: 14-17, and the 4 KPS are arranged in 2 open reading frames comprising sequences of SEQ ID NOS: 26-27. In some embodiments, the biosynthetic gene cluster further comprises a SARP-encoding gene comprising a sequence of SEQ ID NO: 28, which is located upstream of the 2 KPS open reading frames, for example as shown in FIG. 2A.

[0192] In some embodiments, the biosynthetic gene cluster comprises a sequence of SEQ ID NO: 1, or a sequence having at least 90%, at least 95%, at least 97% or at least 99% identity thereto. In some embodiments, the biosynthetic gene cluster comprises a sequence of SEQ ID NO: 1. In some embodiments, the biosynthetic gene cluster consists essentially of a sequence of SEQ ID NO: 1.

[0193] In some embodiments, one or more genes of the biosynthetic gene cluster are expressed by a host cell comprising the biosynthetic gene cluster, resulting the production of the compound of Formula (I). In some embodiments, the host cells is engineered to express one or more genes in the biosynthetic cluster, which results in the production of the compound of Formula (I).

[0194] In some embodiments, overexpression of one or more genes in the biosynthetic cluster by the host cell increases the production of the compound of Formula (I) compared to an otherwise equivalent host cell comprising a biosynthetic gene cluster that does not overexpress one or more genes in the biosynthetic cluster.

[0195] In some embodiments, the modified host cell increases the production of the compound of Formula (I) by about 5%, about 10%, about 15%, about 20%, about 25%, about 30%, about 35%, about 40%, about 45%, about 50%, about 55%, about 60%, about 65%, about 70%, about 75%, about 80%, about 85%, about 90%, about 95%, about 96%, about 97%, about 98%, about 99%, or about 100% as measured by LCMS.

[0196] In some embodiments, the host cell overexpresses the SARP-encoding gene. SARP can be overexpressed in cis or in trans. For example, for cis over expression, the promoter of the SARP protein in the biosynthetic gene cluster can be modified to increase SARP expression. Alternatively, or in addition, SARP can be expressed in trans to the biosynthetic gene cluster by the host cell, for example by using a strong promoter to drive SARP expression.

[0197] Without wishing to be bound by theory, it is thought that the SARP protein regulates the expression of additional genes in the biosynthetic gene cluster by acting as a transcriptional activator. Increasing the expression of SARP increases the expression of SARP target genes in the biosynthetic gene cluster, thereby increasing the production of the compound of Formula (I) by the host cell.

[0198] In some embodiments, increasing the expression of SARP increases the production of the compound of Formula (I) by at least about 5%, about 10%, about 15%, about 20%, about 25%, about 30%, about 35%, about 40%, about 45%, about 50%, about 55%, about 60%, about 65%, about 70%, about 75%, about 80%, about 85%, about 90%, about 95%, about 96%, about 97%, about 98%, about 99%, or about 100% as measured by LCMS.

[0199] The disclosure provides polynucleotides comprising a sequence encoding the SARP protein and a sequence of a promoter, for the overexpression of SARP protein in a host cell. The SARP protein can be expressed in trans in a host cell, from a polynucleotide that does not form a part of the biosynthetic gene cluster. For example, the host cell can comprise a first vector comprising the biosynthetic gene cluster, and a second vector comprising the sequences of the SARP protein and a promoter.

[0200] As used herein, “promoter” refers to a DNA sequence capable of controlling the expression of a coding sequence or functional RNA.

[0201] In some embodiments of the polynucleotides comprising a sequence encoding the SARP protein and a sequence of promoter, the two are operably linked. In some embodiments, the sequence encoding the SARP protein comprises a sequence of SEQ ID NO: 28, and the promoter comprises a sequence of SEQ ID NOS: 33-36 as set forth in Table 3.

[0202] Representative promoters that can be used to overexpress genes such as SARP, either in cis by insertion into the BGC, or in trans, are presented in Table 3 below.

TABLE 3
Promoter Sequences

| Name | DNA Sequence |
|---|---|
| ermE* | AGGTGCACGCGGTCGATCTTGACGGCTGGCGAGAGGTGCGGGGAGGATCTGACCGACGCG |
| | (SEQ ID NO: 33) |
| KasO* | AACTCCCCCAGTCCTGCACGCTGTCGTATTCTCCTGGCCACGACTTTACAACACCGCACAGC |
| | ATGTTGTCAAAGCAGAGACCGTTCGAATGTGAACA (SEQ ID NO: 34) |
| gapdh | GCGTATCCCCTTTCAGATACTCGCACTAAGAATTGCAGGAACGCCCCGATCATAGCGGTAGC |
| | CGCCCAGATGCTGCAAGCCTTATCTGGCAGCCGTATAAAAAAAGCAACCGAACAGGCCATTC |
| | ACAGAAGTTTCACACCGCTCGCCGAGGGGCTCCGCACCCGGTGCGCGCCGTACAGCAGCGCG |
| | CTTCTCCCAGCATCGGCCAGTTCGCCCGATCCGTCCGTGTCGCACAGCCGACGGCTGCGGTA |
| | AGGTGCCCGTAGACGCACGTCCGACCGAAGGAGCAGC (SEQ ID NO: 35) |
| rpslp | GCCCCGGGCCGGAGGCGGCCGCGACCACGACGCCCGCGGGACGTGACGAGCGGCACGACTCG |
| | ACGACTCCGGGCTCCTTTGACGCTGTCCGTCGCGCCGGGTAGCGTAGGACACCGTGCCCGCG |
| | CCGTCGGGCCCTCGCGCGTGCACTCGGTCGACCGCTCCCTGCCGGAGTGGGTGCGGGTGCAC |
| | GGGGTGGCTCCCCACCTCCTCTCGGATCGGTCCTCGCGGACTGCCGCCGTGCGGAGGACCGG |
| | GGCGACACGCCCGGGCGCGGGGGTCGGTGCGGGACTCCAGACCTCCGGGGTAGTCGTGCGAC |
| | GGGCGACGATCCGGGCCGAGCCGGCCGTCCTGGGTGACGGGTGCCGGTCAGACCAGAGAACA |
| | CCGACAGACGGAGACGTA (SEQ ID NO: 36) |

[0203] In some embodiments, trans overexpression of the SARP-encoding gene comprises expressing the SARP-encoding gene under the control of an ermE promoter, a kasO promoter, a gapdh promoter, a rpslp promoter, or a functional variant or derivative thereof. In some embodiments, trans overexpression of the SARP-encoding gene comprises expressing the SARP-encoding gene under the control of a constitutive ermE promoter, or a functional variant or derivative thereof. In some embodiments, the ermE promoter is an ermE* promoter comprising a sequence of SEQ ID NO: 33.

### Modified Biosynthetic Gene Clusters

[0204] The disclosure provides polynucleotides comprising biosynthetic gene clusters that have been modified relative to their wild type, or native equivalents, to increase production of the compound of Formula (I) when the genes of the biosynthetic gene cluster are expressed by a host cell.

[0205] In some embodiments, the modified polynucleotide increases the production of the compound of Formula (I) by about 5%, about 10%, about 15%, about 20%, about 25%, about 30%, about 35%, about 40%, about 45%, about 50%, about 55%, about 60%, about 65%, about 70%, about 75%, about 80%, about 85%, about 90%, about 95%, about 96%, about 97%, about 98%, about 99%, or about 100% as measured by LCMS.

[0206] Modifications of the biosynthetic gene cluster can be modified relative to a biosynthetic gene cluster comprising a sequence of SEQ ID NO: 1, or a sequence having at least 95%, at least 97% or at least 99% identity thereto. In some embodiments, the modification comprises one or more modifications relative to a sequence of SEQ ID NO: 1.

[0207] In some embodiments, the biosynthetic gene cluster is modified to overexpress the SARP protein in a host cell, thereby increasing production of the compound of Formula (I) by the host cell. In some embodiments, the at least one modification of the biosynthetic gene cluster comprises a modification that results in overexpression of the SARP-encoding gene in comparison to the expression of the SARP-encoding gene by the biosynthetic gene cluster of SEQ ID NO: 1.

[0208] All modifications are envisaged as within the scope of the instant disclosure. Exemplary, but non-limiting, modifications include substitutions, deletions, inversions, or insertions of heterologous sequences. In some embodiments, the one or more modifications of the biosynthetic gene cluster comprises a substitution, deletion, inversion, or insertion of one or more nucleotides relative to SEQ ID NO: 1.

[0209] In some embodiments, the one or more modifications comprise modifications of a promoter of a gene in the biosynthetic gene cluster. For example, a heterologous promoter sequence can be inserted near the coding sequence of one or more genes of the BGC. Alternatively, or in addition, one or more promoters of a gene in the BGC can be replaced with a heterologous promoter. Heterologous promoters include, inter alia, strong promoters, constitutive promoters and regulatable promoters. Exemplary strong promoters include ermE* (SEQ ID NO: 33), kasO (SEQ ID NO: 34), gapdh (SEQ ID NO: 35) and rpslp (SEQ ID NO: 36) as shown in Table 3. In some embodiments, replacement of one or more promoters comprises replacement of the SARP promoter, for example with a promoter shown in Table 3.

[0210] In some embodiments, the one or more modifications comprise insertion of at least one heterologous promoter in the biosynthetic gene cluster of SEQ ID NO: 1. In some embodiments, the at least one heterologous promoter is a strong promoter. In some embodiments, the at least one heterologous promoter is selected from the group consisting of ermE, kasO, gapdh, and rpslp, or functional variants or derivatives thereof. In some embodiments, the at least one heterologous promoter comprises a sequence of SEQ ID NOS: 33-36, or a functional variant or derivative thereof. For example, engineered versions of the ermE and kasO promoters used herein are sometimes referred to herein as ermE* and kasO*. In some embodiments, the at least one heterologous promoter comprises a sequence of SEQ ID NOS: 33-36, or a sequence having at least 90%, at least 95%, at least 97% or at least 99% identity thereto.

[0211] In some embodiments, the one or more modifications comprise insertion of at least one promoter in the biosynthetic gene cluster. In some embodiments, the at least one promoter is inserted upstream of the mbtH gene. For example, an ermE* promoter of SEQ ID NO: 33 or a kasO* promoter of SEQ ID NO: 34 is inserted upstream of the mbtH gene in SEQID NO: 1. Alternatively, or in addition, the at least one promoter is inserted between the SARP-encoding gene and the first PKS open reading frame in the biosynthetic gene cluster of SEQ ID NO: 1. For example, an rpslp promoter of SEQ ID NO: 36 or a kasO* promoter of SEQ ID NO: 34 is inserted between the SARP-encoding gene and the first PKS open reading frame in SEQ ID NO: 1. Alternatively, or in addition, the at least one promoter is inserted downstream of the second PKS open reading frame and upstream of the ornithine monooxygenase gene of SEQ ID NO: 1. For example, an gapdh promoter of SEQ ID NO: 35 is inserted downstream of the second PKS open reading frame and upstream of the ornithine monooxygenase gene of SEQ ID NO: 1.

[0212] In some embodiments the biosynthetic gene cluster comprising one or more modifications relative to SEQ ID NO: 1. In some embodiments the modified biosynthetic gene cluster comprises SEQ ID NO: 49 or 50.

### Methods of Modifying Biosynthetic Gene Clusters

[0213] The disclosure provides methods of modifying the biosynthetic gene clusters described herein. In some embodiments, methods of modifying the biosynthetic gene clusters described herein comprise a nucleic acid guided endonuclease.

[0214] The disclosure provides methods of modifying biosynthetic gene clusters comprising (a) providing a first E. coli host cell comprising a first vector comprising a sequence of an unmodified biosynthetic gene cluster comprising a target sequence; (b) introducing the first vector into a Streptomyces host cell by conjugation; (c) providing a second E. coli host cell comprising a second vector comprising: (i) a sequence of at least one gNA specific to the target sequence operably linked to a promoter, (ii) a sequence encoding a Cas9 endonuclease; and (iii) a sequence encoding a donor template; and (d) introducing the second vector into a Streptomyces host cell by conjugation; whereby introducing the second vector into the Streptomyces host cell produces a double strand break in the target sequence and introduction of a donor template sequence, thereby generating a Streptomyces host cell comprising a modified biosynthetic gene cluster. In some embodiments, the unmodified gene cluster comprises SEQ ID NO: 1, and the one or more modifications are modifications of SEQ ID NO: 1.

[0215] In some embodiments, the nucleic acid guided endonuclease is a CRISPR/Cas endonuclease. In some embodiments, the CRISPR/Cas endonuclease is Cas9. Other endonucleases known in the art may be used with the constructs described herein.

[0216] As used herein, “CRISPR/Cas endonuclease” refers to an enzymatic system that includes a guide nucleic acid (gNA) contains a nucleotide sequence complementary or substantially complementary to a region of a target polynucleotide, and a protein with active Nuclease. The CRISPR/Cas systems include the CRISPR-Cas Type I system, the CRISPR-Cas Type II system, the CRISPR-Cas Type III system, and derivatives thereof. CRISPR/Cas systems include genetically modified nuclease systems and/or programmed nuclease systems derived from naturally occurring CRISPR-Cas systems. CRISPR-Cas systems can contain genetically modified Cas proteins and/or mutated Cas proteins. CRISPR/Cas systems may contain genetically modified and/or programmed gNA.

[0217] As used herein, the term “guide nucleic acid” or “gNA” refers to an NA that contains a sequence complementary or substantially complementary to a region of a target DNA sequence. A gNA may contain nucleotide sequences in a region other than the region complementary or substantially complementary to a region of a target DNA sequence, sometimes termed a leader RNA. A leader RNA can be an rRNA or a derivative thereof, for example, a rRNA: chimera RNAtracr. gNAs can be RNAs (gRNAs) or DNAs (gDNAs).

[0218] In the CRISPR/Cas systems described herein, the gNA forms a complex with the CRISPR/Cas enzyme and the targeting portion of the gNA targets the CRISPR/Cas endonuclease to a specific target sequence in a target DNA polynucleotide. The CRISPR/Cas endonuclease then cuts the DNA, producing a double strand break. This double strand break can be repaired by non-homologous end joining, resulting in a deletion, or by homology directed repair (HDR) from a donor template. If the donor template includes sequences different from the target DNA polynucleotide, these sequence differences are incorporated into the target DNA polynucleotide.

[0219] In some embodiments, the donor template comprises, from 5′ to 3′, a sequence homologous to a sequence 5′ of the target sequence, a sequence of a promoter, and sequence homologous to a sequence 3′ of the target sequence. In some embodiments, the promoter is selected from the group consisting of ermk, kasO, gapdh, and rpslp, or functional variants or derivatives thereof.

[0220] In some embodiments, the biosynthetic gene cluster comprises a sequence of SEQ ID NO: 1. In some embodiments, the sequence of SEQ ID NO: 1 is modified using a CRISPR/Cas endonuclease and a donor template to insert at least one heterologous promoter into the biosynthetic gene cluster. The heterologous at least one promoter can be inserted upstream of the mbtH gene in SEQ ID NO: 1, between the sequence of the SARP-encoding gene and the first PKS open reading frame in SEQ ID NO: 1, or downstream of the second PKS open reading frame and upstream of the ornithine monooxygenase gene in SEQ ID NO: 1.

[0221] Exemplary targeting sequences used to insert a promoter upstream of the mbtH gene are shown in Table 4 below. In some embodiments, the targeting sequence of the at least one gNA used to modify the BGC comprises SEQ ID NOS: 40-44, or a sequence having at least 80%, at least 85%, at least 90%, or at least 95% thereto. In some embodiments, the targeting sequence of the at least one gNA used to modify the BGC comprises SEQ ID NOS: 40-44.

TABLE 4
gNA Targeting sequences for mbtH

| Name | Sequence | SEQ ID NO |
|---|---|---|
| AZT010-sg1 | ATGAGGACCCTATCTGGGGG | 40 |
| AZT010-sg2 | CGAGTGCGCTCACTTCGGGG | 41 |
| AZT010-sg3 | CGAGCGGAGAGACGCCGGAA | 42 |
| AZT010-sg4 | GTGGCGTCAGCATTTCAGGG | 43 |
| AZT010-sg5 | GTCACGGGATGACTCGAAAG | 44 |

[0222] In some embodiments, gRNAs comprise a targeting sequence, sometimes referred to as a protospacer, and a scaffold. An exemplary sequence encoding a gRNA scaffold comprises a sequence of

[0223] GTTTTAGAGCTAGAAATAGCAAGTTAAAATAAGGCTAGTCCGTTATCAACTTGAA AAAGTGGCACCGAGTCGGTGC (SEQ ID NO: 45). An exemplary sequence encoding a Cas9 single gRNA (sgRNA) comprises, from 5′ to 3′, a targeting sequence complementary to a target sequence, and a scaffold sequence, for example SEQ ID NO: 45.

[0224] In some embodiments, the CRISPR/Cas endonuclease is a Cas9 endonuclease. An exemplary Cas9 endonuclease for use in the methods described herein comprises as sequence of SEQ ID NO: 47, and is encoded by a sequence of SEQ ID NO: 48.

[0225] In some embodiments, inserting at least one heterologous promoter into the biosynthetic gene cluster further comprises a donor template comprising a sequence of the heterologous promoter.

### Vectors

[0226] The disclosure provides vectors comprising the polynucleotides of the disclosure. In some embodiments, the vectors comprise the sequence of the biosynthetic gene cluster of SEQ ID NO: 1, or a sequence having at least at least 90%, at least 95%, at least 97% or at least 99% identity thereto. In some embodiments, the vector comprise the sequence of a biosynthetic gene cluster comprising at least one modification relative to SEQ ID NO: 1, for example the insertion of a heterologous promoter.

[0227] Suitable vectors for the cloning and expression of the biosynthetic gene clusters described herein will be known to persons of ordinary skill in the art. For example, suitable vectors for expressing biosynthetic gene clusters in Streptomyces are described in US20200291430A1, the contents of which are incorporated by reference in their entirety herein.

[0228] Exemplary vectors include, inter alia, cloning sites, promoters to direct expression of gene products, and selectable markers for host cells such as Streptomyces and/or E. coli. In some embodiments, the expression vector further comprises an E. coli and/or Streptomyces origin of replication. In some embodiments, the expression vector further comprises one or more selectable markers for E. coli and/or Streptomyces. A number of antibiotic resistance markers are available for Streptomyces, and include thiostrepton (tsr), kanamycin-neomycin (kmr), apramycin (amr), geneticin, viomycin, hygromycin, bleomycin, chloramphenicol, and the like.

[0229] In some embodiments, the expression vector further comprises a gene that stabilizes large plasmids. In some embodiments, the expression vector is configured to accept an insert comprising more than 10 kb, more than 20 kb, more than 50 kb, and/or more than 100 kb.

[0230] Suitable vectors can be configured to express a product of the biosynthetic gene cluster nucleic acid when the expression vector is present in a host cell, such as a Streptomyces host cell.

[0231] In some embodiments the vector is an expression vector.

[0232] In some embodiments the vector is a shuttle vector. As used herein, the term “shuttle vector” refers to a vector constructed so that it can propagate in two different host species, e.g., E. coli and another organism such as Streptomyces.

[0233] In some embodiments, the vector is a plasmid or a bacterial artificial chromosome.

### Synthesis of the Compounds of the Disclosure

[0234] In some embodiments, the compound of Formula (I) is synthesized using a semi-synthetic approach. In some embodiments, the compound of Formula (I) is synthesized using a biosynthetic approach.

[0235] In some embodiments, the compound is cyclized with the use of a biosynthetic gene cluster (BCG) such as the biosynthetic gene cluster described supra, sometimes referred to herein as the AZT010 biosynthetic gene cluster.

[0236] As used herein, “AZT010 biosynthetic gene cluster” refers to a biosynthetic gene cluster isolated or derived from Streptomyces species, which is described further detail supra. In some embodiments, the AZT010 biosynthetic gene cluster is isolated or derived from Streptomyces griseochromogenes. In some embodiments, the AZT010 biosynthetic gene cluster is isolated or derived from Streptomyces griseochromogenes strain ATCC 14511 (www.atcc.org/Products/All/14511?geo_country=us). The freeze-dried ATCC is not a pharmaceutical composition. The freeze-dried ATCC does not comprise detectable levels of a compound of Formula (I).

[0237] In some embodiments, the wild-type AZT010 biosynthetic gene cluster is modified. In some embodiments, the modified AZT010 biosynthetic gene cluster produces a compound of Formula (I). For the avoidance of doubt, the modification(s) of the BGC is necessary to produce quantifiable levels of the compounds of the disclosure. Modifications of the biosynthetic gene cluster can be carried out by any methods known in the art. For example, the BGC can be modified using a CRISPR/Cas endonuclease.

[0238] In some embodiments, the present disclosure provides a method of making a compound of Formula (I) comprising:
[0239] a. genome mining to identify a biosynthetic gene cluster;
[0240] b. modifying the identified biosynthetic gene cluster;
[0241] c. identifying a target compound; and
[0242] d. isolating the target compound.

[0243] In some embodiments, the genome mining identifies a biosynthetic gene cluster. In some embodiments, the identified biosynthetic gene cluster is AZT010. In some embodiments, AZT010 is isolated or derived from Streptomyces griseochromogenes strain ATCC 14511.

[0244] In some embodiments, the genome is sequenced prior to modification.

[0245] In some embodiments, the biosynthetic gene cluster is modified by overexpression of at least one gene in the cluster. In some embodiments, the overexpressed gene is SARP (Streptomyces Antibiotic Regulatory Protein).

[0246] In some embodiments, the biosynthetic gene cluster is isolated. In some embodiments, the biosynthetic gene cluster is isolated prior to identifying the target compound. In some embodiments, the biosynthetic gene cluster is isolated prior to isolating the target compound.

[0247] In some embodiments, the biosynthetic gene cluster is expressed in a heterologous host. In some embodiments, the heterologous host is S. albus.

[0248] In some embodiments, the biosynthetic gene cluster is further modified. In some embodiments, the biosynthetic gene cluster is further modified by the insertion of one or more strong promoters, using methods provided herein. In some embodiments, the strong promoter is kasO, or a functional derivative thereof.

[0249] In some embodiments, the compound of Formula (I) is isolated from culture.

[0250] In some embodiments, the compound of Formula (I) is isolated and then purified.

[0251] In some embodiments, the present disclosure provides a method of making a compound of Formula (I) further comprising a step of: (e) purifying the isolated compound.

[0252] In some embodiments, the present disclosure provides a method of making a compound of Formula (I), or derivatizing the compound of Formula (I), by solid phase peptide synthesis wherein the amino acid α-N-terminal is protected by an acid or base protecting group. Such protecting groups should have the properties of being stable to the conditions of peptide linkage formation while being readily removable without destruction of the growing peptide chain or racemization of any of the chiral centers contained therein. Suitable protecting groups are 9-fluorenylmethyloxycarbonyl (Fmoc), t-butyloxycarbonyl (Boc), benzyloxycarbonyl (Cbz), biphenylisopropyloxycarbonyl, t-amyloxycarbonyl, isobornyloxycarbonyl, α,α-dimethyl-3,5-dimethoxybenzyloxycarbonyl, o-nitrophenylsulfenyl, 2-cyano-t-butyloxycarbonyl, and the like. Other side chain protecting groups are, for example, for side chain amino groups (e.g., lysine and arginine) are 2,2,5,7,8-pentamethylchroman-6-sulfonyl (pmc), nitro, p-toluenesulfonyl, 4-methoxybenzene-sulfonyl, Cbz, Boc, and adamantyloxycarbonyl; for tyrosine are benzyl, o-bromobenzyloxy-carbonyl, 2,6-dichlorobenzyl, isopropyl, t-butyl (t-Bu), cyclohexyl, cyclopentyl and acetyl (Ac); for serine are t-butyl, benzyl and tetrahydropyranyl; for histidine are trityl, benzyl, Cbz, p-toluenesulfonyl and 2,4-dinitrophenyl; for tryptophan are formyl; for aspartic acid and glutamic acid are benzyl and t-butyl; and for cysteine are triphenylmethyl (trityl). In the solid phase peptide synthesis method, the α-C-terminal amino acid is attached to a suitable solid support or resin. Suitable solid supports useful for the above synthesis are those materials which are inert to the reagents and reaction conditions of the stepwise condensation-deprotection reactions, as well as being insoluble in the media used. Solid supports for synthesis of α-C-terminal carboxy peptides may be 4-hydroxymethylphenoxymethyl-copoly(styrene-1% divinylbenzene) or 4-(2′,4′-dimethoxyphenyl-Fmoc-aminomethyl)phenoxyacetamidoethyl. The α-C-terminal amino acid may be coupled to the resin by means of N,N′-dicyclohexylcarbodiimide (DCC), N,N′-diisopropylcarbodiimide (DIC), or O-benzotriazol-1-yl-N,N,N′,N′-tetramethyluroniumhexafluorophosphate (HBTU), with or without 4-dimethylaminopyridine (DMAP), 1-hydroxybenzotriazole (HOBT), benzotriazol-1-yloxy-tris(dimethylamino)phosphoniumhexafluorophosphate (BOP), or bis(2-oxo-3-oxazolidinyl)phosphine chloride (BOPCI), mediated coupling for from about 1 hour to about 24 hours at a temperature of between 10° C. and 50° C. in a solvent (e.g., dichloromethane or DMF). When the solid support is 4-(2′,4′-dimethoxyphenyl-Fmoc-aminomethyl)phenoxy-acetamidoethyl resin, the Fmoc group is cleaved with a secondary amine (e.g., piperidine) prior to coupling with the α-C-terminal amino acid as described above. The coupling of successive protected amino acids may be carried out in an automatic polypeptide synthesizer. In some embodiments, the α-N-terminal in the amino acids of the growing peptide chain are protected with Fmoc. The removal of the Fmoc protecting group from the α-N-terminal side of the growing peptide may be accomplished by treatment with a secondary amine (e.g., piperidine). Each protected amino acid may then be introduced in about 3-fold molar excess, and the coupling may be carried out in DMF. Following completion of synthesis, the polypeptide is removed from the resin and deprotected, either in successively or in a single operation. Removal of the polypeptide and deprotection may be accomplished in a single operation by treating the resin-bound polypeptide with a cleavage reagent (e.g., thianisole, water, ethanedithiol, and trifluoroacetic acid). In cases wherein the α-C-terminal of the polypeptide is an alkylamide, the resin may be cleaved by aminolysis with an alkylamine. Alternatively, the peptide may be removed by transesterification (e.g. with methanol) followed by aminolysis or by direct transamidation. The protected peptide may be purified or taken directly to the next step without purification. The removal of the side chain protecting groups may be accomplished using the appropriate cleavage conditions. The fully deprotected peptide may be purified by a sequence of chromatographic steps employing one or more of the following types: ion exchange on a weakly basic resin (acetate form); hydrophobic adsorption chromatography on underivatized polystyrene-divinylbenzene (e.g., Amberlite XAD); silica gel adsorption chromatography; ion exchange chromatography on carboxymethylcellulose; partition chromatography (e.g., on Sephadex G-25, LH-20 or countercurrent distribution); high performance liquid chromatography (HPLC), such as reverse-phase HPLC on octyl- or octadecylsilyl-silica bonded phase column packing.

[0253] In some embodiments, compounds of the present disclosure can be prepared in a variety of ways using commercially available starting materials, compounds known in the literature, or from readily prepared intermediates, by employing standard synthetic methods and procedures either known to those skilled in the art, or which will be apparent to the skilled artisan in light of the teachings herein. Standard synthetic methods and procedures for the preparation of organic molecules and functional group transformations and manipulations can be obtained from the relevant scientific literature or from standard textbooks in the field. Although not limited to any one or several sources, classic texts such as Smith, M. B., March, J., March's Advanced Organic Chemistry: Reactions, Mechanisms, and Structure, 5^{th} edition, John Wiley & Sons: New York, 2001; Greene, T. W., Wuts, P. G. M., Protective Groups in Organic Synthesis, 3^{rd} edition, John Wiley & Sons: New York, 1999; R. Larock, Comprehensive Organic Transformations, VCH Publishers (1989); L. Fieser and M. Fieser, Fieser and Fieser's Reagents for Organic Synthesis, John Wiley and Sons (1994); and L. Paquette, ed., Encyclopedia of Reagents for Organic Synthesis, John Wiley and Sons (1995), incorporated by reference herein, are useful and recognized reference textbooks of organic synthesis known to those in the art

[0254] One of ordinary skill in the art will note that, during the reaction sequences and synthetic scheme described herein, the order of certain steps may be changed, such as the introduction and removal of protecting groups. One of ordinary skill in the art will recognize that certain groups may require protection from the reaction conditions via the use of protecting groups. Protecting groups may also be used to differentiate similar functional groups in molecules. A list of protecting groups and how to introduce and remove these groups can be found in Greene, T. W., Wuts, P. G. M., Protective Groups in Organic Synthesis, 3^{rd} edition, John Wiley & Sons: New York, 1999.

[0255] It is to be understood that one skilled in the art may refer to general reference texts for detailed descriptions of known techniques discussed herein or equivalent techniques. These texts include Ausubel et al., Current Protocols in Molecular Biology, John Wiley and Sons, Inc. (2005); Sambrook et al., Molecular Cloning, A Laboratory Manual (3^{rd} edition), Cold Spring Harbor Press, Cold Spring Harbor, New York (2000); Coligan et al., Current Protocols in Immunology, John Wiley & Sons, N.Y.; Enna et al., Current Protocols in Pharmacology, John Wiley & Sons, N.Y.; Fingl et al., The Pharmacological Basis of Therapeutics (1975), Remington's Pharmaceutical Sciences, Mack Publishing Co., Easton, PA, 18^{th} edition (1990). These texts can, of course, also be referred to in making or using an aspect of the disclosure.

Production of the Compounds of Formula (I) from Host Cells

[0256] The disclosure provides methods of making the compound of Formula (I) in a host cell comprising the biosynthetic gene cluster described herein.

[0257] In some embodiments, the host cell does not produce the compound of Formula (I) in the absence of the biosynthetic gene cluster described herein.

[0258] The disclosure provides methods of making the compound of Formula (I), comprising (a) introducing into a host cell the polynucleotides or vectors of the disclosure; (b) culturing the host cell under conditions sufficient for the synthesis of the compound of Formula (I) by the biosynthetic gene cluster; and (c) isolating and purifying the compound of Formula (I). In some embodiments, the host cell is a Streptomyces cell, such as a Streptomyces griseochromogenes or Streptomyces albus cell. In some embodiments, the host cell comprises a sequence encoding a SARP operably linked to a constitutive promoter.

[0259] Methods of introducing polynucleotides and vectors into suitable host cells will be known to persons of ordinary skill in the art, and include electroporation and by conjugation with an E. coli cell comprising the polynucleotide or vector.

[0260] Intergenic conjugation with E. coli allows for the introduction of vectors into Streptomyces species. Exemplary vectors for intergeneric conjugation between E. coli and Streptomyces comprise the 760-bp oriT fragment for conjugation, but require the transfer functions to be supplied in trans by the E. coli donor strain Some vectors include the attachment site (attP) and the integrase (int) function of the temperate phage φ31 to facilitate the site-specific integration of the vector at the affB site of the Streptomyces chromosome.

### Host Cells

[0261] The disclosure provides host cells. comprising the polynucleotides and vectors described herein.

[0262] In some embodiments, for example those embodiments where the BGC is an unmodified BGC of SEQ ID NO: 1, the host cell further comprises a polynucleotide comprising a sequence encoding a SARP operably linked to a constitutive promoter, such as ermE*. In some embodiments the sequence encoding the SARP comprises SEQ ID NO: 28.

[0263] The host cell, or host organism, is typically, but not necessarily, a genetically tractable (e.g., culturable under laboratory conditions and manipulable by molecular biological techniques) organism. The host organism may be a member of the domain Bacteria, the domain Eukarya, or the domain Archaea. In some embodiments, the host microorganism is from the domain Bacteria. In some embodiments, the host organism is a bacterium in the terrabacteria group. In particular embodiments, the host microorganism is from the taxa Actinobacteria, Streptomycetales, or Streptomycetaceae. In some embodiments, the host is from the genus Streptomyces. In some embodiments, the host is a Streptomyces expression strain, e.g., as defined herein (e.g. Streptomyces averminlis, Streptomyces venezuelae, Streptomyces albus, Streptomyces lividans, and Streptomyces coelicolor). In some embodiments, the host organism is a Streptomyces species. In some embodiments, the host is Streptomyces albus.

[0264] As used herein the term “Streptomyces expression strains” or “heterologous Streptomyces expression strains” refers to bacterial strains including, but not limited to, commonly used species such as Streptomyces avermitilis, Streptomyces venezuelae, Streptomyces albas, Streptomyces lividans, and Streptomyces coelicolor.

Methods of culturing host cells will be known to persons of ordinary skill in the art and are described in “Laboratory Maintenance of Streptomyces species,” Curr Protoc Microbiol. 2010 August; CHAPTER. Unit-10E.1, the contents of which are incorporated by reference in their entirety herein. For example, Streptomyces may be grown in suitable liquid media (e.g., Tryptic Soy-Broth (TSB), R2YE and YEME media) at about 28 ° C., in baffled Erlenmeyer or similar shaking flask systems. Long term storage of Streptomyces can be accomplished through glycerol stocks.

### Pharmaceutical Compositions

[0265] In some aspects, the present disclosure provides a pharmaceutical composition comprising the compound of Formula (I) as an active ingredient. In some embodiments, the present disclosure provides a pharmaceutical composition comprising the compound of Formula (I) and one or more pharmaceutically acceptable carriers, diluents or excipients. Pharmaceutically acceptable carriers, diluents or excipients include without limitation any adjuvant, carrier, excipient, glidant, sweetening agent, diluent, preservative, dye/colorant, flavor enhancer, surfactant, wetting agent, dispersing agent, suspending agent, stabilizer, isotonic agent, solvent, or emulsifier.

[0266] As used herein, the term “composition” is intended to encompass a product comprising the specified ingredients in the specified amounts, as well as any product which results, directly or indirectly, from combination of the specified ingredients in the specified amounts.

[0267] It is to be understood that the present disclosure also provides pharmaceutical compositions comprising any compound described herein in combination with at least one pharmaceutically acceptable excipient or carrier.

[0268] As used herein, the term “pharmaceutical composition” is a formulation containing the compounds of the present disclosure in a form suitable for administration to a subject. In some embodiments, the pharmaceutical composition is in bulk or in unit dosage form. The unit dosage form is any of a variety of forms, including, for example, a capsule, an IV bag, a tablet, a single pump on an aerosol inhaler or a vial. The quantity of active ingredient (e.g., a formulation of the compound of Formula (I)) in a unit dose of composition is an effective amount and is varied according to the particular treatment involved. One skilled in the art will appreciate that it is sometimes necessary to make routine variations to the dosage depending on the age and condition of the patient. The dosage will also depend on the route of administration. A variety of routes are contemplated, including oral, pulmonary, rectal, parenteral, transdermal, subcutaneous, intravenous, intramuscular, intraperitoneal, inhalational, buccal, sublingual, intrapleural, intrathecal, intranasal, and the like. Dosage forms for the topical or transdermal administration of a compound of this disclosure include powders, sprays, ointments, pastes, creams, lotions, gels, solutions, patches and inhalants. In one embodiment, the active compound is mixed under sterile conditions with a pharmaceutically acceptable carrier, and with any preservatives, buffers, or propellants that are required.

[0269] It is to be understood that, for any compound, the therapeutically effective amount can be estimated initially either in cell culture assays, e.g., of neoplastic cells, or in animal models, usually rats, mice, rabbits, dogs, or pigs. The animal model may also be used to determine the appropriate concentration range and route of administration. Such information can then be used to determine useful doses and routes for administration in humans. Therapeutic/prophylactic efficacy and toxicity may be determined by standard pharmaceutical procedures in cell cultures or experimental animals, e.g., ED₅₀ (the dose therapeutically effective in 50% of the population) and LD₅₀ (the dose lethal to 50% of the population). The dose ratio between toxic and therapeutic effects is the therapeutic index, and it can be expressed as the ratio, LD₅₀/ED₅₀. Pharmaceutical compositions that exhibit large therapeutic indices are preferred. The dosage may vary within this range depending upon the dosage form employed, sensitivity of the patient, and the route of administration.

[0270] Dosage and administration are adjusted to provide sufficient levels of the active agent(s) or to maintain the desired effect. Factors which may be taken into account include the severity of the disease state, general health of the subject, age, weight, and gender of the subject, diet, time and frequency of administration, drug combination(s), reaction sensitivities, and tolerance/response to therapy. Long-acting pharmaceutical compositions may be administered every 3 to 4 days, every week, or once every two weeks depending on half-life and clearance rate of the particular formulation.

[0271] The pharmaceutical compositions containing active compounds of the present disclosure may be manufactured in a manner that is generally known, e.g., by means of conventional mixing, dissolving, granulating, dragee-making, levigating, emulsifying, encapsulating, entrapping, or lyophilizing processes. Pharmaceutical compositions may be formulated in a conventional manner using one or more pharmaceutically acceptable carriers comprising excipients and/or auxiliaries that facilitate processing of the active compounds into preparations that can be used pharmaceutically. Of course, the appropriate formulation is dependent upon the route of administration chosen.

[0272] The compounds, or pharmaceutically acceptable salts thereof, may be administered orally, nasally, transdermally, pulmonary, inhalationally, buccally, sublingually, intraperitoneally, subcutaneously, intramuscularly, intravenously, rectally, intrapleurally, intrathecally and parenterally. In one embodiment, the compound is administered orally. One skilled in the art will recognize the advantages of certain routes of administration.

[0273] The dosage regimen utilizing the compounds is selected in accordance with a variety of factors including type, species, age, weight, sex and medical condition of the patient; the severity of the condition to be treated; the route of administration; the renal and hepatic function of the patient; and the particular compound or salt thereof employed. An ordinarily skilled physician or veterinarian can readily determine and prescribe the effective amount of the drug required to prevent, counter, or arrest the progress of the condition. An ordinarily skilled physician or veterinarian can readily determine and prescribe the effective amount of the drug required to counter or arrest the progress of the condition.

[0274] In certain embodiments, the pharmaceutical compositions of the present disclosure may additionally contain other adjunct components conventionally found in pharmaceutical compositions, at their art-established usage levels. Thus, for example, the pharmaceutical compositions may contain additional, compatible, pharmaceutically-active materials such as antipruritics, astringents, local anesthetics or anti-inflammatory agents, or may contain additional materials useful in physically formulating various dosage forms of the compositions of the present invention, such as dyes, flavoring agents, preservatives, antioxidants, opacifiers, thickening agents and stabilizers. However, such materials, when added, should not unduly interfere with the biological activities of the components of the compositions of the present invention. The formulations can be sterilized and, if desired, mixed with auxiliary agents, e.g., lubricants, preservatives, stabilizers, wetting agents, emulsifiers, salts for influencing osmotic pressure, buffers, colorings, flavorings and/or aromatic substances and the like which do not deleteriously interact with the oligonucleotide(s) of the formulation.

[0275] Techniques for formulation and administration of the disclosed compounds of the disclosure can be found in Remington: the Science and Practice of Pharmacy, 19^{th} edition, Mack Publishing Co., Easton, PA (1995). In an embodiment, the compounds described herein, and the pharmaceutically acceptable salts thereof, are used in pharmaceutical preparations in combination with a pharmaceutically acceptable carrier or diluent. Suitable pharmaceutically acceptable carriers include inert solid fillers or diluents and sterile aqueous or organic solutions. The compounds will be present in such pharmaceutical compositions in amounts sufficient to provide the desired dosage amount in the range described herein.

[0276] The compound of Formula (I) can be formulated for oral administration in forms such as, for example, tablets, lozenges, hard or soft capsules, aqueous or oily suspensions, emulsions, dispersible powders, granules, syrups, elixirs, and tinctures. The compound of Formula (I) can also be formulated for intravenous (bolus or in-fusion), intraperitoneal, topical (for example as creams, ointments, gels, or aqueous or oily solutions or suspensions), inhalation (for example as a finely divided powder or a liquid aerosol), for administration by insufflation (for example as a finely divided powder), or parenteral administration (for example as a sterile aqueous or oily solution for intravenous, subcutaneous, intramuscular, intraperitoneal or intramuscular dosing) as a suppository for rectal dosing, or transdermal (e.g., patch).

[0277] In some embodiments, the present disclosure provides pharmaceutical compositions comprising a compound of Formula (I) combined with a pharmaceutically acceptable carrier. In some embodiments, suitable pharmaceutically acceptable carriers include, but are not limited to, inert solid fillers or diluents and sterile aqueous or organic solutions. Pharmaceutically acceptable carriers are well known to those skilled in the art and include, but are not limited to, from about 0.01 to about 0.1 M phosphate buffer or saline (e.g., about 0.8%). Such pharmaceutically acceptable carriers can be aqueous or non-aqueous solutions, suspensions and emulsions. Examples of non-aqueous solvents suitable for use in the present application include, but are not limited to, propylene glycol, polyethylene glycol, vegetable oils such as olive oil, and injectable organic esters such as ethyl oleate.

[0278] Liquid carriers suitable for use in the present application can be used in preparing solutions, suspensions, emulsions, syrups, elixirs and pressurized compounds. The active ingredient can be dissolved or suspended in a pharmaceutically acceptable liquid carrier such as water, an organic solvent, a mixture of both or pharmaceutically acceptable oils or fats. The liquid carrier can contain other suitable pharmaceutical additives such as solubilizers, emulsifiers, buffers, preservatives, sweeteners, flavoring agents, suspending agents, thickening agents, colors, viscosity regulators, stabilizers or osmo-regulators.

[0279] Liquid carriers suitable for use in the present application include, but are not limited to, water (partially containing additives as above, e.g. cellulose derivatives, preferably sodium carboxymethyl cellulose solution), alcohols (including monohydric alcohols and polyhydric alcohols, e.g. glycols) and their derivatives, and oils (e.g. fractionated coconut oil and arachis oil). For parenteral administration, the carrier can also include an oily ester such as ethyl oleate and isopropyl myristate. Sterile liquid carriers are useful in sterile liquid form comprising compounds for parenteral administration. The liquid carrier for pressurized compounds disclosed herein can be halogenated hydrocarbon or other pharmaceutically acceptable propellent.

[0280] Aqueous carriers suitable for use in the present application include, but are not limited to, water, ethanol, alcoholic/aqueous solutions, glycerol, emulsions or suspensions, including saline and buffered media. Oral carriers can be elixirs, syrups, capsules, tablets and the like.

[0281] The formulation of the present disclosure may be in the form of an aqueous solution comprising an aqueous vehicle. The aqueous vehicle component may comprise water and at least one pharmaceutically acceptable excipient. Suitable acceptable excipients include those selected from the group consisting of a solubility enhancing agent, chelating agent, preservative, tonicity agent, viscosity/suspending agent, buffer, and pH modifying agent, and a mixture thereof.

[0282] Any suitable solubility enhancing agent can be used. Examples of a solubility enhancing agent include cyclodextrin, such as those selected from the group consisting of hydroxypropyl-β-cyclodextrin, methyl-β-cyclodextrin, randomly methylated-β-cyclodextrin, ethylated-β-cyclodextrin, triacetyl-β-cyclodextrin, peracetylated-β-cyclodextrin, carboxymethyl-β-cyclodextrin, hydroxyethyl-β-cyclodextrin, 2-hydroxy-3-(trimethylammonio)propyl-β-cyclodextrin, glucosyl-β-cyclodextrin, sulfated B-cyclodextrin (S-β-CD), maltosyl-β-cyclodextrin, β-cyclodextrin sulfobutyl ether, branched-β-cyclodextrin, hydroxypropyl-γ-cyclodextrin, randomly methylated-γ-cyclodextrin, and trimethyl-γ-cyclodextrin, and mixtures thereof.

[0283] Any suitable chelating agent can be used. Examples of a suitable chelating agent include those selected from the group consisting of ethylenediaminetetraacetic acid and metal salts thereof, disodium edetate, trisodium edetate, and tetrasodium edetate, and mixtures thereof.

[0284] Any suitable preservative can be used. Examples of a preservative include those selected from the group consisting of quaternary ammonium salts such as benzalkonium halides (preferably benzalkonium chloride), chlorhexidine gluconate, benzethonium chloride, cetyl pyridinium chloride, benzyl bromide, phenylmercury nitrate, phenylmercury acetate, phenylmercury neodecanoate, merthiolate, methylparaben, propylparaben, sorbic acid, potassium sorbate, sodium benzoate, sodium propionate, ethyl p-hydroxybenzoate, propylaminopropyl biguanide, and butyl-p-hydroxybenzoate, and sorbic acid, and mixtures thereof.

[0285] The aqueous vehicle may also include a tonicity agent to adjust the tonicity (osmotic pressure). The tonicity agent can be selected from the group consisting of a glycol (such as propylene glycol, diethylene glycol, triethylene glycol), glycerol, dextrose, glycerin, mannitol, potassium chloride, and sodium chloride, and a mixture thereof.

[0286] The aqueous vehicle may also contain a viscosity/suspending agent. Suitable viscosity/suspending agents include those selected from the group consisting of cellulose derivatives, such as methyl cellulose, ethyl cellulose, hydroxyethylcellulose, polyethylene glycols (such as polyethylene glycol 300, polyethylene glycol 400), carboxymethyl cellulose, hydroxypropylmethyl cellulose, and cross-linked acrylic acid polymers (carbomers), such as polymers of acrylic acid cross-linked with polyalkenyl ethers or divinyl glycol (Carbopols—such as Carbopol 934, Carbopol 934P, Carbopol 971, Carbopol 974 and Carbopol 974P), and a mixture thereof.

[0287] In order to adjust the formulation to an acceptable pH (typically a pH range of about 5.0 to about 9.0, more preferably about 5.5 to about 8.5, particularly about 6.0 to about 8.5, about 7.0 to about 8.5, about 7.2 to about 7.7, about 7.1 to about 7.9, or about 7.5 to about 8.0), the formulation may contain a pH modifying agent. The pH modifying agent is typically a mineral acid or metal hydroxide base, selected from the group of potassium hydroxide, sodium hydroxide, and hydrochloric acid, and mixtures thereof, and preferably sodium hydroxide and/or hydrochloric acid. These acidic and/or basic pH modifying agents are added to adjust the formulation to the target acceptable pH range. Hence it may not be necessary to use both acid and base—depending on the formulation, the addition of one of the acid or base may be sufficient to bring the mixture to the desired pH range.

[0288] The aqueous vehicle may also contain a buffering agent to stabilize the pH. When used, the buffer is selected from the group consisting of a phosphate buffer (such as sodium dihydrogen phosphate and disodium hydrogen phosphate), a borate buffer (such as boric acid, or salts thereof including disodium tetraborate), a citrate buffer (such as citric acid, or salts thereof including sodium citrate), and ε-aminocaproic acid, and mixtures thereof.

[0289] Solid carriers suitable for use in the present application include, but are not limited to, inert substances such as lactose, starch, glucose, methyl-cellulose, magnesium stearate, dicalcium phosphate, mannitol and the like. A solid carrier can further include one or more substances acting as flavoring agents, lubricants, solubilizers, suspending agents, fillers, glidants, compression aids, binders or tablet-disintegrating agents; it can also be an encapsulating material. In powders, the carrier can be a finely divided solid which is in admixture with the finely divided active compound. In tablets, the active compound is mixed with a carrier having the necessary compression properties in suitable proportions and compacted in the shape and size desired. The powders and tablets preferably contain up to 99% of the active compound. Suitable solid carriers include, for example, calcium phosphate, magnesium stearate, talc, sugars, lactose, dextrin, starch, gelatin, cellulose, polyvinylpyrrolidine, low melting waxes and ion exchange resins. A tablet may be made by compression or molding, optionally with one or more accessory ingredients. Compressed tablets may be prepared by compressing in a suitable machine the active ingredient in a free flowing form such as a powder or granules, optionally mixed with a binder (e.g., povidone, gelatin, hydroxypropylmethyl cellulose), lubricant, inert diluent, preservative, disintegrant (e.g., sodium starch glycolate, cross-linked povidone, cross-linked sodium carboxymethyl cellulose) surface active or dispersing agent. Molded tablets may be made by molding in a suitable machine a mixture of the powdered compound moistened with an inert liquid diluent. The tablets may optionally be coated or scored and may be formulated so as to provide slow or controlled release of the active ingredient therein using, for example, hydroxypropyl methylcellulose in varying proportions to provide the desired release profile. Tablets may optionally be provided with an enteric coating, to provide release in parts of the gut other than the stomach.

[0290] Parenteral carriers suitable for use in the present application include, but are not limited to, sodium chloride solution, Ringer's dextrose, dextrose and sodium chloride, lactated Ringer's and fixed oils. Intravenous carriers include fluid and nutrient replenishers, electrolyte replenishers such as those based on Ringer's dextrose and the like. Preservatives and other additives can also be present, such as, for example, antimicrobials, antioxidants, chelating agents, inert gases and the like.

[0291] Carriers suitable for use in the present application can be mixed as needed with disintegrants, diluents, granulating agents, lubricants, binders and the like using conventional techniques known in the art. The carriers can also be sterilized using methods that do not deleteriously react with the compounds, as is generally known in the art.

[0292] Diluents may be added to the formulations of the present invention. Diluents increase the bulk of a solid pharmaceutical composition and/or combination, and may make a pharmaceutical dosage form containing the composition and/or combination easier for the patient and care giver to handle. Diluents for solid compositions and/or combinations include, for example, microcrystalline cellulose (e.g., AVICEL), microfine cellulose, lactose, starch, pregelatinized starch, calcium carbonate, calcium sulfate, sugar, dextrates, dextrin, dextrose, dibasic calcium phosphate dihydrate, tribasic calcium phosphate, kaolin, magnesium carbonate, magnesium oxide, maltodextrin, mannitol, polymethacrylates (e.g., EUDRAGIT(r)), potassium chloride, powdered cellulose, sodium chloride, sorbitol, and talc.

[0293] In various embodiments, the pharmaceutical composition may be selected from the group consisting of a solid, powder, liquid and a gel. In certain embodiments, the pharmaceutical compositions of the present disclosure is a solid (e.g., a powder, tablet, a capsule, granulates, and/or aggregates). In certain of such embodiments, the solid pharmaceutical composition comprises one or more excipients known in the art, including, but not limited to, starches, sugars, diluents, granulating agents, lubricants, binders, and disintegrating agents.

[0294] In some embodiments, the pharmaceutical compositions of the present disclosure are prepared for oral administration. In certain of such embodiments, the pharmaceutical compositions are formulated by combining one or more agents and pharmaceutically acceptable carriers. Certain of such carriers enable pharmaceutical compositions to be formulated as tablets, pills, dragees, capsules, liquids, gels, syrups, slurries, suspensions and the like, for oral ingestion by a subject. Suitable excipients include, but are not limited to, fillers, such as sugars, including lactose, sucrose, mannitol, or sorbitol; cellulose preparations such as, for example, maize starch, wheat starch, rice starch, potato starch, gelatin, gum tragacanth, methyl cellulose, hydroxypropylmethyl-cellulose, sodium carboxymethylcellulose, and/or polyvinylpyrrolidone (PVP). In certain embodiments, such a mixture is optionally ground and auxiliaries are optionally added. In certain embodiments, pharmaceutical compositions are formed to obtain tablets or dragee cores. In certain embodiments, disintegrating agents (e.g., cross-linked polyvinyl pyrrolidone, agar, or alginic acid or a salt thereof, such as sodium alginate) are added.

[0295] In some embodiments, dragee cores are provided with coatings. In certain such embodiments, concentrated sugar solutions may be used, which may optionally contain gum arabic, talc, polyvinyl pyrrolidone, carbopol gel, polyethylene glycol, and/or titanium dioxide, lacquer solutions, and suitable organic solvents or solvent mixtures. Dyestuffs or pigments may be added to tablets or dragee coatings.

[0296] In some embodiments, pharmaceutical compositions for oral administration are push-fit capsules made of gelatin. Certain of such push-fit capsules comprise one or more pharmaceutical agents of the present invention in admixture with one or more filler such as lactose, binders such as starches, and/or lubricants such as talc or magnesium stearate and, optionally, stabilizers. In certain embodiments, the pharmaceutical compositions for oral administration are soft, sealed capsules made of gelatin and a plasticizer, such as glycerol or sorbitol. In certain soft capsules, one or more compounds disclosed herein, or a pharmaceutically acceptable solvate, hydrate, tautomer, N-oxide, or salt thereof, are be dissolved or suspended in suitable liquids, such as fatty oils, liquid paraffin, or liquid polyethylene glycols. In addition, stabilizers may be added.

[0297] Solid pharmaceutical compositions that are compacted into a dosage form, such as a tablet, may include excipients whose functions include helping to bind the active ingredient and other excipients together after compression. Binders for solid pharmaceutical compositions and/or combinations include acacia, alginic acid, carbomer (e.g., carbopol), carboxymethylcellulose sodium, dextrin, ethyl cellulose, gelatin, guar gum, gum tragacanth, hydrogenated vegetable oil, hydroxyethyl cellulose, hydroxypropyl cellulose (e.g., KLUCEL), hydroxypropyl methyl cellulose (e.g., METHOCEL), liquid glucose, magnesium aluminum silicate, maltodextrin, methylcellulose, polymethacrylates, povidone (e.g., KOLLIDON, PLASDONE), pregelatinized starch, sodium alginate, and starch.

[0298] The dissolution rate of a compacted solid pharmaceutical composition in the patient's stomach may be increased by the addition of a disintegrant to the composition and/or combination. Disintegrants include alginic acid, carboxymethylcellulose calcium, carboxymethylcellulose sodium (e.g., AC-DI-SOL and PRIMELLOSE), colloidal silicon dioxide, croscarmellose sodium, crospovidone (e.g., KOLLIDON and POLYPLASDONE), guar gum, magnesium aluminum silicate, methyl cellulose, microcrystalline cellulose, polacrilin potassium, powdered cellulose, pregelatinized starch, sodium alginate, sodium starch glycolate (e.g., EXPLOTAB), potato starch, and starch.

[0299] Glidants can be added to improve the flowability of a non-compacted solid composition and/or combination and to improve the accuracy of dosing. Excipients that may function as glidants include colloidal silicon dioxide, magnesium trisilicate, powdered cellulose, starch, talc, and tribasic calcium phosphate.

[0300] When a dosage form such as a tablet is made by the compaction of a powdered composition, the composition is subjected to pressure from a punch and dye. Some excipients and active ingredients have a tendency to adhere to the surfaces of the punch and dye, which can cause the product to have pitting and other surface irregularities. A lubricant can be added to the composition and/or combination to reduce adhesion and ease the release of the product from the dye. Lubricants include magnesium stearate, calcium stearate, glyceryl monostearate, glyceryl palmitostearate, hydrogenated castor oil, hydrogenated vegetable oil, mineral oil, polyethylene glycol, sodium benzoate, sodium lauryl sulfate, sodium stearyl fumarate, stearic acid, talc, and zinc stearate.

[0301] Flavoring agents and flavor enhancers make the dosage form more palatable to the patient. Common flavoring agents and flavor enhancers for pharmaceutical products that may be included in the composition and/or combination of the present invention include maltol, vanillin, ethyl vanillin, menthol, citric acid, fumaric acid, ethyl maltol, and tartaric acid.

[0302] Solid and liquid compositions may also be dyed using any pharmaceutically acceptable colorant to improve their appearance and/or facilitate patient identification of the product and unit dosage level.

[0303] In certain embodiments, a pharmaceutical composition of the present invention is a liquid (e.g., a suspension, elixir and/or solution). In certain of such embodiments, a liquid pharmaceutical composition is prepared using ingredients known in the art, including, but not limited to, water, glycols, oils, alcohols, flavoring agents, preservatives, and coloring agents.

[0304] Liquid pharmaceutical compositions can be prepared using compounds of the present disclosure, or a pharmaceutically acceptable solvate, hydrate, tautomer, N-oxide, or salt thereof, and any other solid excipients where the components are dissolved or suspended in a liquid carrier such as water, vegetable oil, alcohol, polyethylene glycol, propylene glycol, or glycerin.

[0305] For example, formulations for parenteral administration can contain as common excipients sterile water or saline, polyalkylene glycols such as polyethylene glycol, oils of vegetable origin, hydrogenated naphthalenes and the like. In particular, biocompatible, biodegradable lactide polymer, lactide/glycolide copolymer, or polyoxyethylene-polyoxypropylene copolymers can be useful excipients to control the release of active compounds. Other potentially useful parenteral delivery systems include ethylene-vinyl acetate copolymer particles, osmotic pumps, implantable infusion systems, and liposomes. Formulations for inhalation administration contain as excipients, for example, lactose, or can be aqueous solutions containing, for example, polyoxyethylene-9-auryl ether, glycocholate and deoxycholate, or oily solutions for administration in the form of nasal drops, or as a gel to be applied intranasally. Formulations for parenteral administration can also include glycocholate for buccal administration, methoxysalicylate for rectal administration, or citric acid for vaginal administration.

[0306] Liquid pharmaceutical compositions can contain emulsifying agents to disperse uniformly throughout the composition and/or combination an active ingredient or other excipient that is not soluble in the liquid carrier. Emulsifying agents that may be useful in liquid compositions and/or combinations of the present invention include, for example, gelatin, egg yolk, casein, cholesterol, acacia, tragacanth, chondrus, pectin, methyl cellulose, carbomer, cetostearyl alcohol, and cetyl alcohol.

[0307] Liquid pharmaceutical compositions can also contain a viscosity enhancing agent to improve the mouth-feel of the product and/or coat the lining of the gastrointestinal tract. Such agents include acacia, alginic acid bentonite, carbomer, carboxymethylcellulose calcium or sodium, cetostearyl alcohol, methyl cellulose, ethylcellulose, gelatin guar gum, hydroxyethyl cellulose, hydroxypropyl cellulose, hydroxypropyl methyl cellulose, maltodextrin, polyvinyl alcohol, povidone, propylene carbonate, propylene glycol alginate, sodium alginate, sodium starch glycolate, starch tragacanth, and xanthan gum.

[0308] Sweetening agents such as aspartame, lactose, sorbitol, saccharin, sodium saccharin, sucrose, aspartame, fructose, mannitol, and invert sugar may be added to improve the taste.

[0309] Preservatives and chelating agents such as alcohol, sodium benzoate, butylated hydroxyl toluene, butylated hydroxyanisole, and ethylenediamine tetraacetic acid may be added at levels safe for ingestion to improve storage stability.

[0310] In some embodiments, a pharmaceutical composition is prepared for administration by injection (e.g., intravenous, subcutaneous, intramuscular, etc.). In certain of such embodiments, a pharmaceutical composition comprises a carrier and is formulated in aqueous solution, such as water or physiologically compatible buffers such as Hanks's solution, Ringer's solution, or physiological saline buffer. In certain embodiments, other ingredients are included (e.g., ingredients that aid in solubility or serve as preservatives). In certain embodiments, injectable suspensions are prepared using appropriate liquid carriers, suspending agents and the like. Certain pharmaceutical compositions for injection are presented in unit dosage form, e.g., in ampoules or in multi-dose containers. Certain pharmaceutical compositions for injection are suspensions, solutions or emulsions in oily or aqueous vehicles, and may contain formulatory agents such as suspending, stabilizing and/or dispersing agents. Certain solvents suitable for use in pharmaceutical compositions for injection include, but are not limited to, lipophilic solvents and fatty oils, such as sesame oil, synthetic fatty acid esters, such as ethyl oleate or triglycerides, and liposomes. Aqueous injection suspensions may contain substances that increase the viscosity of the suspension, such as sodium carboxymethyl cellulose, sorbitol, or dextran. Optionally, such suspensions may also contain suitable stabilizers or agents that increase the solubility of the pharmaceutical agents to allow for the preparation of highly concentrated solutions.

[0311] The sterile injectable preparation may also be a sterile injectable solution or suspension in a non-toxic parenterally acceptable diluent or solvent, such as a solution in 1,3-butane-diol or prepared as a lyophilized powder. Among the acceptable vehicles and solvents that may be employed are water, Ringer's solution and isotonic sodium chloride solution. In addition, sterile fixed oils may conventionally be employed as a solvent or suspending medium. For this purpose any bland fixed oil may be employed including synthetic mono- or diglycerides. In addition, fatty acids such as oleic acid may likewise be used in the preparation of injectables. Formulations for intravenous administration can comprise solutions in sterile isotonic aqueous buffer. Where necessary, the formulations can also include a solubilizing agent and a local anesthetic to ease pain at the site of the injection. Generally, the ingredients are supplied either separately or mixed together in unit dosage form, for example, as a dry lyophilized powder or water free concentrate in a hermetically sealed container such as an ampule or sachet indicating the quantity of active agent. Where the compound is to be administered by infusion, it can be dispensed in a formulation with an infusion bottle containing sterile pharmaceutical grade water, saline or dextrose/water. Where the compound is administered by injection, an ampule of sterile water for injection or saline can be provided so that the ingredients can be mixed prior to administration.

[0312] Suitable formulations further include aqueous and non-aqueous sterile injection solutions that can contain antioxidants, buffers, bacteriostats, bactericidal antibiotics and solutes that render the formulation isotonic with the bodily fluids of the intended recipient; and aqueous and non-aqueous sterile suspensions, which can include suspending agents and thickening agents.

[0313] In certain embodiments, a pharmaceutical compositions of the present invention are formulated as a depot preparation. Certain such depot preparations are typically longer acting than non-depot preparations. In certain embodiments, such preparations are administered by implantation (for example subcutaneously or intramuscularly) or by intramuscular injection. In certain embodiments, depot preparations are prepared using suitable polymeric or hydrophobic materials (for example an emulsion in an acceptable oil) or ion exchange resins, or as sparingly soluble derivatives, for example, as a sparingly soluble salt.

[0314] In certain embodiments, a pharmaceutical composition of the present invention comprises a sustained-release system. A non-limiting example of such a sustained-release system is a semi-permeable matrix of solid hydrophobic polymers. In certain embodiments, sustained-release systems may, depending on their chemical nature, release pharmaceutical agents over a period of hours, days, weeks or months.

[0315] The formulation may further comprise a wetting agent. Suitable classes of wetting agents include those selected from the group consisting of polyoxypropylene-polyoxyethylene block copolymers (poloxamers), polyethoxylated ethers of castor oils, polyoxyethylenated sorbitan esters (polysorbates), polymers of oxyethylated octyl phenol (Tyloxapol), polyoxyl 40 stearate, fatty acid glycol esters, fatty acid glyceryl esters, sucrose fatty esters, and polyoxyethylene fatty esters, and mixtures thereof.

[0316] The amount of the compound of Formula (I) may be present in the composition in a therapeutically effective amount. For example, in some embodiments, the compound may be administered at about 0.001 mg/kg to about 100 mg/kg body weight (e.g., about 0.01 mg/kg to about 10 mg/kg or about 0.1 mg/kg to about 5 mg/kg).

[0317] A therapeutically effective amount of the compound of Formula (I) for use in therapy is an amount sufficient to treat or prevent cancer, slow its progression and/or reduce the symptoms associated with the condition.

[0318] A therapeutically effective amount of the compound of Formula (I) for use in therapy is an amount sufficient to treat cancer, slow its progression and/or reduce the symptoms associated with the condition.

[0319] A therapeutically effective amount of the compound of Formula (I) for use in therapy is an amount sufficient to treat or prevent fibrosis, slow its progression and/or reduce the symptoms associated with the condition.

[0320] A therapeutically effective amount of the compound of Formula (I) for use in therapy is an amount sufficient to treat fibrosis, slow its progression and/or reduce the symptoms associated with the condition.

[0321] The size of the dose for therapeutic or prophylactic purposes of Compound A will naturally vary according to the nature and severity of the conditions, the age and sex of the animal or patient and the route of administration, according to well-known principles of medicine.

[0322] Examples of useful dermatological compositions which can be used to deliver Compound A to the skin are known to the art; for example, see Jacquet et al. (U.S. Pat. No. 4,608,392), Geria (U.S. Pat. No. 4,992,478), Smith et al. (U.S. Pat. No. 4,559,157) and Wortzman (U.S. Pat. No. 4,820,508).

### Methods of Use

[0323] A “subject” includes a mammal. The mammal can be e.g., a human or appropriate non-human mammal, such as primate, mouse, rat, dog, cat, cow, horse, goat, camel, sheep or a pig. The subject can also be a bird or fowl. In one embodiment, the mammal is a human.

[0324] In some embodiments, the present disclosure provides a method of treating or preventing a disease or disorder disclosed herein in a subject in need thereof, comprising administering to the subject a therapeutically effective amount of the compound of Formula (I) or a pharmaceutical composition of the present disclosure.

[0325] In some embodiments, the present disclosure provides a method of treating cancer in a subject in need thereof, comprising administering to the subject a therapeutically effective amount of the compound of Formula (I) or a pharmaceutical composition of the present disclosure.

[0326] In some embodiments, the present disclosure provides a method of treating or preventing a disease or disorder disclosed herein in a subject in need thereof, comprising administering to the subject a compound of Formula (I) or a pharmaceutical composition of the present disclosure.

[0327] In some embodiments, the present disclosure provides a method of treating cancer in a subject in need thereof, comprising administering to the subject a compound of Formula (I) or a pharmaceutical composition of the present disclosure.

[0328] In some embodiments, the present disclosure provides a method of treating fibrosis in a subject in need thereof, comprising administering to the subject a therapeutically effective amount of the compound of Formula (I) or a pharmaceutical composition of the present disclosure.

[0329] In some embodiments, the present disclosure provides a method of treating fibrosis in a subject in need thereof, comprising administering to the subject a compound of Formula (I) or a pharmaceutical composition of the present disclosure.

[0330] In some embodiments, the present disclosure provides the compound of Formula (I) for use in treating cancer in a subject in need thereof.

[0331] In some embodiments, the present disclosure provides the compound of Formula (I) for use in treating fibrosis in a subject in need thereof.

[0332] In embodiments, the present disclosure provides use of the compound of Formula (I) in the manufacture of a medicament for treating a disease or disorder disclosed herein.

[0333] In some embodiments, the present disclosure provides use of the compound of Formula (I) in the manufacture of a medicament for treating cancer in a subject in need thereof.

[0334] In some embodiments, the present disclosure provides use of the compound of Formula (I) in the manufacture of a medicament for treating fibrosis in a subject in need thereof.

[0335] In some embodiments, the present disclosure provides use of the compound of Formula (I) for the treatment of a disease or disorder disclosed herein.

[0336] In some embodiments, the present disclosure provides use of the compound of Formula (I) for the treatment of cancer.

[0337] In some embodiments, the present disclosure provides use of the compound of Formula (I) for the treatment of fibrosis.

[0338] In some embodiments, the disease or disorder is a cancer.

[0339] In some embodiments, the cancer is a disease that involves abnormal cell growth with the potential to invade or spread to other parts of the body.

[0340] In some embodiments, the cancer is a malignant tumor or neoplasm.

[0341] In some embodiments, the cancer is breast cancer, pancreatic cancer, non-small cell lung cancer, ovarian cancer, esophageal cancer, melanoma, lymphoma, uterine cancer, peritoneal cancer, fallopian tube cancer, endometrial cancer, cervical cancer, thyroid cancer, gastric cancer, gastroesophageal junction cancer, urothelial cancer, bladder cancer, oropharynx cancer, hypopharynx cancer, larynx cancer, head and neck cancer, germ cell cancer/tumors, prostate cancer, colon cancer, rectal cancer, kidney cancer, cholangiocarcinoma (bile duct cancer), glioblastoma, leukemia, or non-Hodgkin lymphoma.

[0342] In some embodiments, the cancer is Acute Lymphoblastic Leukemia, Acute Myeloid Leukemia, Adrenocortical Carcinoma, AIDS-Related Cancers, Kaposi Sarcoma, Lymphoma, Anal Cancer, Appendix Cancer, Astrocytomas, Childhood Atypical Teratoid/Rhabdoid Tumor, Basal Cell Carcinoma, Skin Cancer (Nonmelanoma), Childhood Bile Duct Cancer, Extrahepatic Bladder Cancer, Bone Cancer, Ewing Sarcoma Family of Tumors, Osteosarcoma and Malignant Fibrous Histiocytoma, Brain Stem Glioma, Brain Tumors, Embryonal Tumors, Germ Cell Tumors, Craniopharyngioma, Ependymoma, Bronchial Tumors, Burkitt Lymphoma (Non-Hodgkin Lymphoma), Carcinoid Tumor, Gastrointestinal Carcinoma of Unknown Primary, Cardiac (Heart) Tumors, Lymphoma, Primary, Cervical Cancer, Childhood Cancers, Chordoma, Chronic Lymphocytic Leukemia, Chronic Myelogenous Leukemia, Chronic Myeloproliferative Neoplasms Colon Cancer, Colorectal Cancer, Cutaneous T-Cell Lymphoma, Ductal Carcinoma In Situ, Endometrial Cancer, Ependymoma, Esophageal Cancer, Esthesioneuroblastoma, Ewing Sarcoma, Extracranial Germ Cell Tumor, Extragonadal Germ Cell Tumor, Extrahepatic Bile Duct Cancer, Eye Cancer, Intraocular Melanoma, Retinoblastoma, Fibrous Histiocytoma of Bone, Malignant, and Osteosarcoma, Gallbladder Cancer, Gastric (Stomach) Cancer, Gastrointestinal Carcinoid Tumor, Gastrointestinal Stromal Tumors, Extragonadal Cancer, Ovarian Cancer, Testicular Cancer, Gestational Trophoblastic Disease, Glioma, Brain Stem Cancer, Hairy Cell Leukemia, Head and Neck Cancer, Heart Cancer, Hepatocellular (Liver) Cancer, Histiocytosis, Langerhans Cell Cancer, Hodgkin Lymphoma, Hypopharyngeal Cancer, Intraocular Melanoma, Islet Cell Tumors, Pancreatic Neuroendocrine Tumors, Kaposi Sarcoma, Kidney Cancer, Renal Cell Cancer, Wilms Tumor and Other Childhood Kidney Tumors, Langerhans Cell Histiocytosis, Laryngeal Cancer, Leukemia, Chronic Lymphocytic Cancer, Chronic Myelogenous Cancer, Hairy Cell Cancer, Lip and Oral Cavity Cancer, Liver Cancer (Primary), Lobular Carcinoma In Situ (LCIS), Lung Cancer, Non-Small Cell Cancer, Small Cell Cancer, Lymphoma, Cutaneous T-Cell (Mycosis Fungoides and Sézary Syndrome), Hodgkin Cancer, Non-Hodgkin Cancer, Macroglobulinemia, Waldenström, Male Breast Cancer, Malignant Fibrous Histiocytoma of Bone and Osteosarcoma, Melanoma, Intraocular (Eye) Cancer, Merkel Cell Carcinoma, Mesothelioma, Malignant, Metastatic Squamous Neck Cancer with Occult Primary, Midline Tract Carcinoma Involving NUT Gene, Mouth Cancer, Multiple Endocrine Neoplasia Syndromes, Multiple Myeloma/Plasma Cell Neoplasm, Mycosis Fungoides, Myelodysplastic Syndromes, Myelodysplastic/Myeloproliferative Neoplasms, Myelogenous Leukemia, Chronic, Myeloid Leukemia, Acute, Myeloma Multiple, Chronic Myeloproliferative Neoplasms, Nasal Cavity and Paranasal Sinus Cancer, Nasopharyngeal Cancer, Neuroblastoma, Non-Hodgkin Lymphoma, Non-Small Cell Lung Cancer, Oral Cancer, Oral Cavity Cancer, Lip and Oropharyngeal Cancer, Osteosarcoma and Malignant Fibrous Histiocytoma of Bone, Epithelial Cancer, Low Malignant Potential Tumor, Pancreatic Cancer, Pancreatic Neuroendocrine Tumors (Islet Cell Tumors), Papillomatosis, Paraganglioma, Parathyroid Cancer, Penile Cancer, Pharyngeal Cancer, Pheochromocytoma, Pituitary Tumor, Plasma Cell Neoplasm/Multiple Myeloma, Pleuropulmonary Blastoma, Primary Central Nervous System Lymphoma, Rectal Cancer, Renal Cell (Kidney) Cancer, Retinoblastoma, Rhabdomyosarcoma, Salivary Gland Cancer, Sarcoma, Ewing Cancer, Kaposi Cancer, Osteosarcoma (Bone Cancer), Soft Tissue Cancer, Uterine Cancer, Sezary Syndrome, Skin Cancer, Childhood Melanoma, Merkel Cell Carcinoma, Nonmelanoma, Small Cell Lung Cancer, Small Intestine Cancer, Soft Tissue Sarcoma, Squamous Cell Carcinoma, Skin Cancer (Nonmelanoma), Childhood Squamous Neck Cancer with Occult Primary, Metastatic Cancer, Stomach (Gastric) Cancer, T-Cell Lymphoma, Cutaneous Cancer, Testicular Cancer, Throat Cancer, Thymoma and Thymic Carcinoma, Thyroid Cancer, Transitional Cell Cancer of the Renal Pelvis and Ureter, Unknown Primary, Carcinoma of Childhood, Unusual Cancers of Childhood, Urethral Cancer, Uterine Cancer, Endometrial Cancer, Uterine Sarcoma, Vaginal Cancer, Vulvar Cancer, Waldenström Macroglobulinemia, Wilms Tumor, and Women's Cancers.

[0343] In some embodiments, the disease or disorder is a fibrosis.

[0344] Fibrotic conditions are characterized, in whole or in part, by excess production of fibrotic material. These conditions can include systemic sclerosis, multifocal fibrosclerosis, nephrogenic systemic fibrosis, scleroderma (including morphea, generalized morphea, or linear scleroderma), sclerodermatous graft-vs-host-disease, kidney fibrosis (including glomerular sclerosis, renal tubulointerstitial fibrosis, progressive renal disease or diabetic nephropathy), cardiac fibrosis (e.g., myocardial fibrosis), pulmonary fibrosis (e.g. pulmonary fibrosis, glomerulosclerosis pulmonary fibrosis, idiopathic pulmonary fibrosis, silicosis, asbestosis, interstitial lung disease, interstitial fibrotic lung disease, and chemotherapy/radiation induced pulmonary fibrosis), oral fibrosis, endomyocardial fibrosis, deltoid fibrosis, pancreatitis, inflammatory bowel disease, Crohn's disease, nodular fascilitis, eosinophilic fasciitis, general fibrosis syndrome characterized by replacement of normal muscle tissue by fibrous tissue in varying degrees, retroperitoneal fibrosis, liver fibrosis, liver cirrhosis, chronic renal failure; myelofibrosis (bone marrow fibrosis), drug induced ergotism, myelodysplastic syndrome, myeloproferative syndrome, collagenous colitis, acute fibrosis, organ specific fibrosis, and the like.

[0345] In some embodiments, the fibrosis is pulmonary fibrosis, liver fibrosis, heart fibrosis, mediastinal fibrosis, retroperitoneal cavity fibrosis, bone marrow fibrosis, or skin fibrosis.

[0346] In some embodiments, the fibrotic condition is pulmonary hypertension, chronic obstructive pulmonary disease (COPD), idiopathic pulmonary fibrosis, sarcoidosis, cystic fibrosis, familial pulmonary fibrosis, silicosis, asbestosis, coal worker's pneumoconiosis, carbon pneumoconiosis, hypersensitivity pneumonitides, or pulmonary hypertension,

[0347] In some embodiments, the fibrosis is cystic fibrosis.

[0348] In some embodiments, the subject is a mammal. In some embodiments the mammal is a human.

[0349] In some embodiments, the compound of Formula (I) is administered once, twice, three times, four times, or five times per day. In some embodiments, the compound of Formula (I) is administered once daily. In some embodiments, the compound of Formula (I) is administered twice daily. In some embodiments, the compound of Formula (I) is administered three times daily. In some embodiments, the compound of Formula (I) is administered four times daily. In some embodiments, the compound of Formula (I) is administered five times daily.

[0350] In some embodiments, the compound of Formula (I) is administered with a drug holiday. In some embodiments, the compound of Formula (I) is administered without a drug holiday.

### EXAMPLES

[0351] The disclosure is further described in detail by reference to the following experimental examples. These examples are provided for purposes of illustration only, and are not intended to be limiting unless otherwise specified. Thus, the disclosure should in no way be construed as being limited to the following examples, but rather, should be construed to encompass any and all variations which become evident as a result of the teaching provided herein.

[0352] Without further description, it is believed that one of ordinary skill in the art can, using the preceding description and the following illustrative examples, make and utilize the compositions of the present disclosure and practice the claimed methods. The following working examples therefore are not to be construed as limiting in any way the remainder of the disclosure.

### Example 1. Proposed Biosynthesis

[0353] Genome mining was performed using both public databases and internal sequence collection. A prioritized hit was found from the genome of Streptomyces griseochromogenes ATCC 14511.

[0354] Streptomyces griseochromogenes ATCC 14511 was obtained from the ATCC collection for verification of the biosynthetic gene cluster (BGC) by genome sequencing and identification of target compounds. The genome was sequenced using a combination of long-read (ONT) and short-read shotgun (Illumina) platforms. The target AZT010 BGC was identified in a 1.2 Mbp scaffold, confirming the presence and sequence of the gene cluster in the ATCC 14511 genome.

[0355] BGC analysis. The AZT010 gene cluster belongs to the type 1 modular hybrid NRPS-PKS family of BGCs. Six NRPS modules corresponding to the core peptide macrocycle are encoded in 4 open reading frames (aztN, aztO, aztP, and aztAG) (FIG. 1). The PKS contains 4 modules encoded in 2 open reading frames (aztAD and aztAE). Other genes for precursor biosynthesis, post-PKS modifications, regulation, and transport are distributed up and downstream of the NRPS and PKS core genes. aztN contains 7 typical domains belonging to 2 amino acid modules; module 1 contains C-A-T-E domains followed by C-A-T in module 2. aztO has 8 domains from modules 3 and 4; module 3 contains C-A-T-nMT-E domains followed by C-A-T from module 4. Module 5 is encoded in the aztP gene containing C-A-T-TE domains. aztAG downstream of the PKS contains module 6 of the NRPS core with a C (starter)-A-T domain. The presence of E domains (epimerization) in modules 1 and 3 predicted that these substrates are epimerized to D-amino acids in the final structure. From the substrate specificity for the A-domains (Stachelhaus codes and NRPSPredictor in Antismash 4/5), the peptide core of the compound was predicted to be ‘1: bOH-Leu (mod6)-2: piz (mod1)-3: nOHAla (mod2)-4: nMe-phe/trp (mod3)-5: ala/X(mod4)-6: gly/X (mod5)’, with weaker predictions for positions 4, 5, and 6. The PKS core is composed of four modules typical of the AZT BGCs. aztA) gene contains the first 3 modules—module 1 contains a KS-AT-ACP domain, followed by module 2 containing KS-AT-DH-KR-ACP domains, and module 3 with KS-AT-DH-KR-ACP. aztAE contains module 4 with KS-AT-ACP domains. Distinct from the other AZT BGCs, module 3 of the AZT010 PKS lacks an ER domain that corresponds to the saturated THP ring in the PKS tail.

[0356] Without being bound by theory, genes predicted to be involved in the biosynthesis or transformation of precursor amino acids were also identified in AZT010 BGC. azt (Z, AA, AB), homologous to ply(Q,R,S) in the polyoxypeptin biosynthesis, are proposed to be involved in b-OH leucine formation. azt AQ and CO (ktzI and kztT from kutzneride biosynthesis) are involved in the conversion of ornithine to piperazic acid. Azt (K, L., M) homologous to ply ((,D,E) are involved in the formation of hydroxamate containing residues. A set of precursor genes azt (('Q, CR, CS, (T, ('U, C′V) homologous to genes involved in the biosynthesis of cyclohexylalanine in salinosporamide and cinnabaramide BGCs are present in the AZT010 BGC. Based on the prediction of a bulky/ring residue in module 3, this position can be expected to take cyclohexylalanine as a substrate. Other biosynthetic genes identified in the gene cluster include a SARP regulator (aztT), an MbtH (aztI), and three sets of ABC transporters, (azt R/S, BA/BB, and DJ/DK).

### Example 2. Identification of Product/s of AZT010 BGC

[0357] Stable isotope labeling to detect AZTs. Two residues are conserved in most structures of the peptide core of azinothricin-like (AZTs) molecules: β-OH-leucine, and piperazic acid. The enzymatic routes and genes involved for the formation of these non-proteinogenic AAs are present in the AZT010 BGC. β-OH-leucine was proposed to be derived from L-leucine via hydroxylation by a cytochrome P450 enzyme (aztAA). The incorporation of D10-labeled β-OH-leucine in the compound core was detected as a shift of +8 Da in the MS spectra, consistent with the loss of 1H upon hydroxylation at the beta position, and a possible exchange of the acidic alpha proton during NRPS assembly. Piperazic acid residues are biosynthesized from L-ornithine by the action of two enzymes ktzT and ktzI as demonstrated in kutzneride biosynthesis. Homologs of ktzT and ktzI are found in AZT BGCs and this transformation was used as our secondary test for the presence and the number of Piz residues. This approach was validated in proof-of-concept experiments using strains producing known compounds verucopeptin and polyoxypeptin.

[0358] Small scale production and labeling experiments. A glycerol stock of AZT010 producer was scraped and inoculated into 10 mL sterile TSB (tryptic soy broth, 30 g/L) media in 50 mL aerated falcon tubes and grown for 2 to 3 days at 28° C., 220 rpm. 500 uL of this seed culture was inoculated into sterile 50 mL 1SF (glycerol 20 g/L, soybean flour 10 g/L, CaCO3 5 g/L) in 250 mL baffled flask. Cultures were grown for 7 days at 28° C., 220 rpm. On day 3 of production, filter-sterilized D10-leucine was added to the culture flasks to a final concentration of 3 mM. Cultures were grown in triplicates and harvested by extraction on day 7.

[0359] Extraction and LCMS analysis. Cultures were harvested by solvent extraction using 1:1 volumes of Chloroform: IPA (2:1) in 250 mL separatory funnel. The chloroform layer was dried, and the extracts were resuspended in 0.2 mL methanol. For LCMS analysis, 25 uL of the methanol extract was injected into a Phenomenex Kinetex C18 column (2.6 um, 100×4.6 mm). The following general condition was used for all LCMS profiling and analyses: flow rate, 1 mL/min, solvent gradient: 20-100% B in 1-20 mins, 100% B 20-25 min, ramp to 20% B 25-30 min. Solvent A: 0.01% FA in water and solvent B: 0.01% FA Acetonitrile. Samples are monitored with UV diode array, ELSD, and Single Quad ESI MS in positive and negative mode. To identify putative AZT molecules in the extracts, MS chromatograms of cultures with and without added D10-leucine were compared and scanned for peaks in the molecular weight range of 700-1200 Da having a shift of +8 Da in the presence of D10-leucine. Initial target ID experiments in the WT AZT010 strain failed to detect labeled compounds (for example, see FIG. 2B, left panel, compare top (“SG-AZT010-WT”) and bottom (“SG-AZT010-PIJ10257-SARP”); see also FIG. 3, bottom panel). Follow-up strain engineering (next section) resulted in the detectable expression of a labeled peak with a mass of 855 [M−H] at RT 12.4 minutes (see FIG. 2B, left panel, bottom SG-AZT010-PIJ10257-SARP).

### Example 3. Overexpression of SARP Regulator (in trans) in WT Streptomyces griseochromogenes (AZT010) Strain

[0360] SARP (Streptomyces Antibiotic Regulatory Protein) regulators are a class of BGC specific regulators that have been shown to act as positive regulators of compound expression in many species of Streptomyces. AZT010 BGC harbors a SARP, aztT10, located in the middle of the NRPS and PKS core genes. To test if overexpression of this regulator affects AZT010 compound production and enable target identification, aztT10 was cloned into the integrative plasmid, PIJ10257, under the control of constitutive ermE* promoter. The resulting strain, SG-AZT010-PIJ10257-SARP, harboring a copy of the SARP gene was grown for compound production in the presence of D10-leucine as described above. Analysis of the peaks in the extracts of WT SG-AZT010, AZT010 transformed with empty PIJ10257 vector, and SG-AZT010-PIJ10257-SARP showed an overexpressed, D10-Leucine labeled peak at RT 12.4 min with m/z 855 [M-H] (See FIG. 2B, left panel, bottom)

[0361] Cloning of PIJ10257-SARP construct. SARP gene, aztT10, was amplified from genomic DNA of AZT010 producer using primers (azt010-PIJF/R) containing overlaps for Gibson assembly with PIJ10257 plasmid. PIJ10257 plasmid was digested with HindIII for 2 hrs at 37° C. and purified by precipitation. The purified linear plasmid was assembled with the aztT10 PCR fragment using Infusion cloning kit (Takara), transformed into Stellar competent cells (Invitrogen), and plated on LB agar with apramycin (50 ug/mL). Plates were incubated at 30° C. overnight. Colonies were picked into 5 mL LB broth with apramycin (50 ug/mL) and grown overnight at 37° C., 200 rpm. Resulting constructs (PIJ10257 -SARP) were analyzed by restriction digest and verified by sanger sequencing.

[0362] Conjugation of PIJ10257-SARP into AZT010 producer. Verified PIJ10257-SARP plasmid was transformed into ET12576/puz8002 E. coli strain by electroporation. Colonies were selected on apramycin (50 ug/mL) and conjugated into AZT010 WT strain. The receiving AZT010 WT spores were prepared by streaking on MSF agar (mannitol 20 g/L, soy flour 20 g/L, CaCl2 10 mM) and incubating the plates for 7-10 days at 28° C. Recovered spores were aliquoted into 30 uL volumes (approximate spore titer of 10⁹ cells/mL) and stored at −80 ° in 10% glycerol. Exconjugants selected on apramycin (50 ug/mL) /nystatin (30 ug/mL)/nalidixic acid (50 ug/mL) plates were observed after 4-6 days of growth at 30° C. Colonies were picked into 5 mL TSB with apramycin (50 ug/mL) and grown for 3-4 days at 28° C., 220 rpm. Screening primers (pij-azt010-sc-F/R) were used to select for edited strains which were further verified by sanger sequencing.

[0363] Small scale production and identification of target peak. Small scale growth and production was carried out in a matrix of conditions using 5 different production media and 4 different time points. The experiment was performed with triplicates using 50 mL media in 250 mL baffled flasks. Glycerol stocks of SG-AZT010-PIJ10257-SARP strain, SG-AZT010-PIJ10257 plasmid, and SG-AZT010 WT strain were each scraped and inoculated into 10 mL TSB apramycin (50 ug/mL), and grown at 28° C., 220 rpm for 3-4 days. 500 uL of this seed culture was used to inoculate each 50 mL flasks with different media. D10-leucine was added at inoculation. The cultures were grown at 28° C., 220 rpm. Subsets of cultures were harvested at 6, 8, 10, and 14 days, extracted, and analyzed in the LCMS (see extraction and LCMS analysis methods section). Chromatograms were analyzed for peaks that are overexpressed/present in SG-AZT010-PIJ10257-SARP compared to the wild type strain. The mass spectra were then examined for the presence of a mass shift indicating the incorporation of β-OH D10-leucine. Two peaks with the same mass—m/z 855 [M-H], eluting at RT of 12.4 and 12.6 mins were identified as products of the AZT010 BGC (FIG. 2B, bottom left panel).

### Example 4. Heterologous Production of AZT010 BGC in S. albus J1074

[0364] Transfer of AZT010 BGC into S. albus J1074. To confirm that the m/z 855 [M-H] target peak(s) is a product of AZT010 BGC and produce the compounds in a tractable host, the 120 kbp region spanning the core NRPS-PKS gene cluster and surrounding genes was cloned from the chromosome of AZT010 WT. The cloned region contains genes related to precursor biosynthesis, post-pks tailoring, regulation, and transport in addition to the core NRPS-PKS. Cloning was performed by a combination of in vitro CRISPR Cas9 digestion at the specified edges of the gene cluster, and subsequent Gibson assembly with pDualP BAC (Varigen Biosciences). The cloned BGC was sequenced using a combination of long-read and short-read sequencing and conjugated into S. albus J1074 producing the heterologous strain SA-pDualP-AZT010 (FIG. 3). Analysis of extracts from the cultures of SA-pDualP-AZT010 showed production the target peak(s), confirming that m/z 855 [M−H] peaks are products of the AZT010 BGC.

[0365] Conjugal transfer of AZT010 into S. albus. For conjugation of the BGC into S. albus, purified pDualP-AZT010 plasmid DNA was transformed into E. coli S17 cells by electroporation. Colonies were grown at 30° C. overnight under apramycin (50 ug/mL) and trimetropim (10 ug/mL) selection. Colonies were picked into 5 mL of the LB broth and grown overnight at 30° C. under the same antibiotic selection. Overnight cultures were screened for the presence of the BGC using 3 primer sets spanning the gene cluster, as well as a primer set designed for the junction of the backbone plasmid and the BGC. For conjugation, 200 uL of an overnight grown E. coli S17 cells containing the AZT010 BGC was inoculated into 50 mL of LB broth with antibiotics and grown at 37º to an OD600nm of (0.6-0.9). Cells were washed 3× with 20 mL of LB and resuspended in 500 uL SOC. To prepare the receiving S. albus strain, 30 uL of spores (stocked at 10×9 CFUs) was diluted into 1 mL of SOC, heat shocked at 50° C. for 10 min, and cooled at room temperature. 100 uL of the washed E. coli cells were mixed with 200 uL of heat shocked spores. 200 uL of the mating mixture was spotted on ISP4-AMC plates containing nystatin (30 ug/mL) and incubated at 30 o for 16 hours. Grown mating spots were scraped into LB and plated on ISP4-AMC plates with nalidixic acid (50 ug/mL) and nystatin (30 ug/mL) and apramycin (50 ug/mL) and incubated at 30° C. for another 2-4 days. S. albus ex-conjugants were picked into 10 mL of TSB broth containing apramycin (50 ug/mL) and grown for 2 to 3 days in a shaking incubator at 30° C. 220 rpm. Cultures were screened by PCR using the BGC screening primers described above to confirm integration. Confirmed positive strains (SA-pDualP-AZT010) were glycerol stocked and stored for later production studies.

[0366] Small scale production, extraction, and analysis. Small scale production from the SA-pDualP-AZT010 and SA-pDualP was performed using the procedure and conditions described above. The production media used was R5A (Sucrose: 100.0 g/L, K2SO4: 0.25 g/L, MgCl2: 10.12 g/L, Glucose: 10.0 g/L, Casamino Acids: 0.1 g/L, Yeast Extract: 5.0 g/L, MOPS: 21.0 g/L, pH 6.85, trace elements: 2 mL/L) and cultures were grown for 7 days before extraction. Extracts were analyzed by comparing the LCMS chromatograms of SA-pDualP (empty vector control) and SA-pDualP-AZT010. Production of the target peaks m/z 855 [M−H] was confirmed from the SA-pDualP-AZT010 extract, confirming that these peaks are products of the AZT010 BGC.

### Example 5. Titer Improvement in S. albus J1074

[0367] Promoter engineering. To increase the production titer of target peaks and enable isolation and characterization AZT010 in S. albus, a series of known, strong promoters were designed for scarless insertion in the AZT010 BGC by in vivo CRISPR-Cas9 editing (Cobb 2014, Zhang 2017) including ermE*, kasO*, gapdh, and rpslp promoters. Three sites were chosen: 1) upstream of the mbtH gene driving the NRPS operon, 2) in between the NRPS and PKS regions (bidirectional), and 3) downstream of the PKS in front of aztQ precursor biosynthesis gene (FIG. 3).

[0368] Cloning of editing template. A gene-synthesized editing plasmid, pCrispomyces2, was used for scarless editing of BGCs in vivo. Editing plasmids were constructed in two steps 1) insertion of 20 nt protospacer sequences for the target region into the BbSI site by Golden gate assembly, and 2) cloning of the editing fragment containing the desired promoter in between two homologous arms into the Xbal site. Three to five sgRNAs cut sites were designed within a 500-1000 bp of the desired region. Protospacer oligos were annealed and cloned into the plasmid by Golden gate assembly as described (Cobb 2014). The resulting plasmid containing sgRNA recognition sequences were then used as templates for the next step. 1000 bp homologous regions upstream and downstream of the target region for promoter insertion were amplified with primers containing overlaps for 4-way Gibson assembly with the plasmid resulting from step 1, and a PCR-amplified promoter fragment. The resulting editing plasmids containing an sgRNA protospacer sequence under the control of gapdh promoter, and an editing fragment containing 5′-left homologous region-promoter-right homologous region were verified by restriction digests and sanger sequencing.

[0369] Promoter knock-in in SA-pDualP-AZT010 BGC. Sequence verified editing plasmids were transformed into ET12567/puz8002 E. coli cells and conjugated into SA-pDualP-AZT010 strains using the method described with some modifications. Conjugants were grown on the same antibiotics above with the addition of hygromycin (100 ug/mL) to select for the editing plasmid. After 3-4 days, ex-conjugants were re-streaked on plates without hygromycin and incubated at 37° C. to cure the editing plasmid. 10-20 colonies were picked from each editing experiment and grown in 5 mL TSB for 2-3 days at 28° C., 220 rpm. Each culture representing individual colonies were then screened by PCR, targeting the edited regions. When necessary, additional purification was performed by re-streaking of the colonies and subsequent PCR screening. For the insertion of kasO* upstream of the MbtH, 3/12 colonies screened positive for the desired editing. Edited SA-pDualP-AZT010 strains were glycerol stocked. Small scale production comparing the titers of different strains was performed as described. Peaks were quantified as AUC at UV282 nm and calculated using AZT010 pure compound standard curve. From the series of edited strains, SA-pDualP-AZT010-kasO* showed consistently increased titers (up to 10 mg/mL) compared to SA-pDualP-AZT010 only and other edited strains (FIG. 2B). This strain was chosen for LS production of the target molecule(s).

[0370] Construct sequences used to generate the strains in this example are shown in Table 4 below:

TABLE 4
Constructs

| | SEQ ID |
|---|---|
| Name | NO: |
| PIJ10257-SARP-aztT10 (vector sequence with SARP gene | 37 |
| under ermE*p used to integrate into WT AZT010 chromosome) | |
| PIJ10257-SARP-aztT10-hyg (vector sequence with SARP gene | 38 |
| under ermE*p used to integrate into SA-pDualP-AZT010 | |
| chromosome) | |
| PIJ10257-SARP-trns2 (vector sequence with SARP gene and | 39 |
| transporters under ermE*p used to integrate into SA-pDualP- | |
| AZT010 chromosome) | |
| pC2hyg-sg4-AZT010-kasO-editing (editing pCrispomyces2 | 46 |
| plasmid for inserting kasO* promoter into SA-pDualP-AZT010) | |

### Example 6. Large Scale Production and Isolation

[0371] Large scale production. 0.5 mL of 2-3 days old seed cultures prepared as described above was inoculated into 50 mL R5A media in 250 mL baffled flasks. A total of 5-10 L of cultures were grown in batches at 28° C., 220 rpm, and 7 days. At day 7, the cultures (mixed mycelia and broth) were extracted with equal volumes of 1:1 IPA: chloroform twice. The extracts were dried under vacuum to yield the crude material (˜3-10 grams).

[0372] Isolation and purification. Crude extract (3.66 g) from a 5L culture of SA-pDualP-AZT010-kasO* was subjected to silica flash chromatography (ISCO, Teledyne) on a Redisep column (80g) using the following conditions: flowrate 60 ml/min; step gradient: 0-10 min 100% A, 10-20 min 100-0% A, 20-30 min 100% B. Solvent A: chloroform, and Solvent B: methanol. Fractions were automatically collected by peak and volume and monitored at UV282 nm. Fractions were profiled in the LCMS and those containing the target mass were pooled, dried, and subjected to a second flash chromatography fractionation on a C18 Redisep column (50 g). The conditions for the second step are the following: flowrate: 40 mL/min; step gradient: 0-5 min 30% B, 5-35 min 30-60% B; 35-40 min 60 -100% B, 40-50 min 100% B. Solvent A: water and Solvent B: acetonitrile. 13 fractions were collected by peak and volume as monitored at UV 282 nm and subsequently profiled by LCMS. F7 to F11 contained the target peaks with m/z 855 [M−H] and were combined for final HPLC purification on a Luna C18 semipep (100 A, 250×4.6 mm) column. The following HPLC conditions were used: flowrate 4.5 mL/min; isocratic gradient at 50% B for 45 min. Solvent A: 0.1% FA in water with, and Solvent B: 0.1% FA acetonitrile. 15 and 7 mg of m/z 855 [M−H] peaks 1 and 2 were isolated respectively.

### Example 7. Compound Characterization and Planar Structure of AZT010 Compound, Formula (I)

[0373] AZT010 compound 1 peaks were isolated as white powder with UV lambda max at 210 and 282 nm. HR ESIMS analysis gave an m/z 857.4761 [M+H]⁺ and 879.4587 [M+Na]⁺ for both peaks and a molecular formula of C42H64N8O11 (calculated for 857.4761 [M+H]+).

[0374] ¹H NMR spectrum of peak 1 in CDCl₃ is consistent with a peptidic molecule with ¹ H chemical shifts at 4-5 ppm for alpha protons. Distinct chemical shifts shown for AZT-like molecules are also present such as the ¹H at 5.48 ppm for the beta proton of b-OH leucine and a downfield singlet at 9 ppm for the N—OH proton. The full chemical structure (FIG. 3) was determined by a combination of 2D NMR (gHSQC, gCOSY, gTOCSY, HMBC, NOESY) assignments in CDCl₃ and HR ESIMS/MS fragmentation analysis. The presence of β-OH leucine residue was confirmed by HMBC and COSY cross peaks between the alpha, beta positions and the two doublet CH3s of the sidechain. Serine was assigned based on HMBC correlations of the amide NH and alpha proton to the OH linked beta carbon at 59 ppm. 2 piperazic acid residues were assigned from ¹H COSY/TOCSY spin systems with chemical shifts consistent with reported literature, including the unusual NH at 4-5 ppm. The presence of rare non-proteinogenic unsaturated cyclohexyl-alanine residue was confirmed by HMBC correlations between the CH₂ protons of the ring and the double bond CHs at 5.5 (dq, J=9.9) and 5.7 (dd, J 9.6) ppm with corresponding HSQCs at 127.4 and 129 ppm and vise versa. HMBC cross peaks between the N—CH₃ and carbonyl carbons of cyclohexyl-alanine and N—OH alanine supports N-methylation at this position. The sequence of the core peptide (ser-piz-(Nme)cyclohexylala-(NOH)ala-piz-(bOH)leu) was determined by key HMBC correlations and further supported by MS/MS fragmentation in both ESI positive and negative mode.

[0375] The polyketide tail of AZT010 compound 1 is unique among the AZT molecules. While HMBC confirms the amide linkage to the β-OH leucine residue, it lacks the canonical tetrahydropyran ring typified by the anomeric carbon at 95-99 ppm which is missing in the HSQC spectra. Instead, HMBC-COSY-TOSCY correlations reveal and conjugated system with di-ketide-diene tail. Based on the planar structure, the two-peak (multiple peak) behavior of the target compound maybe explained by tautomerism and conjugation at C34.

### EQUIVALENTS

[0376] The details of one or more embodiments of the disclosure are set forth in the accompanying description above. Although any methods and materials similar or equivalent to those described herein can be used in the practice or testing of the present disclosure, the preferred methods and materials are now described. Other features, objects, and advantages of the disclosure will be apparent from the description and from the claims. In the specification and the appended claims, the singular forms include plural referents unless the context clearly dictates otherwise. Unless defined otherwise, all technical and scientific terms used herein have the same meaning as commonly understood by one of ordinary skill in the art to which this disclosure belongs. All patents and publications cited in this specification are incorporated by reference.

[0377] The foregoing description has been presented only for the purposes of illustration and is not intended to limit the disclosure to the precise form disclosed, but by the claims appended hereto.

The application's sequence listing, which the Patent Office published only in electronic form, follows.

SEQUENCE LISTING (50 sequences)

SEQ ID NO: 1 - DNA, 122366 bp, Streptomyces griseochromogenes
gaccgggccagcgcccacgatcactacgtcatgcacaagagatccccttccccaacccacagccggatgggcacccggcaggacctctcgaaacgtgccagaccccaccgacatcggaccgacagcccccgatatgacaccgacaccacggctacgccgctcgatcccccctggtcaaagcgccgatcagccaggaggaggctttacaggtcccaaccccggggactgtcccgttcgattcctggcgtgaagtcggctctgcgacggccaagcgatcactgtcgtcacggggcgggcagctccgtcttctacggcgacaccgacaagcgctggagctgggtccatgtcgacgacctcgccgacgcctacgtccgcatcctcgacaaccccgcggctgtcgacggggagaccttcgtgatcgccgacgagcaacggctgaaggctcttagacgtgcagcgcgcggccgtccgtgccgccggcagactgagccgatcggtgccggagcccgctcgggctcgccccgccggctccccgtgggcgggggagacgggggcggccgatgcgggctaccgccatcccgggcgcgtcggcgtcccgcagcgcgaagtgaccgcggcggcgttccgagcggccgagacatccgaggattgccgaatcggcaagggatggcggggctcgcggcgacgacgctgaatcagctggtgcagcccgtgatcgaggtgtgcacgttctacggcgttctgccgtgggagctgtcgtctcggccactggaccagtacttcgccgggccgggcaggcggggccacaccacgatccgcaagaagatcaccagcgtcgaccagtacttcgcgttcctcgaacagcgctacgccgacgagatcctgcgccggttcggggcggcggtggagtcgccggtcgatgccttcaaccggccccgtcatcgcggggacttcgggctgcggatcccgccgtcccggacggagatgaaggccttcttcacctcatggcgccaagaactgtgctcggcgcgcaagtacccagtggcggtccgcaactacgtgatggcgaagaccgcctacatctcgggagtacgtgcgaccgagctgtgcctggtccggctcggcgatctgcactgggacaacggccagtgggggccgcttcctggtgcggggcaagggggctcgcggctcggggccgcgcgagcgggaggcattcatgttcgccgagggccgtgaactgctgtggtggtacagcgaggagatccggggccttttccccgacgacgcgctggacccctacgctccgctgttcccgtccgagcggttgccgtccgcgctcggcgcggacgtggggatcgcgccgccgatgcatgccgataccttccggcgtgcgctgcgccgtgcctcgctcgcgcatttgaagggcacggtgacggtgcttttcccgcatctgctgcggcatgcctgtgcgacgcataactacgagtcgggatgccgctttgggatgttcaggtgctattggggcacgagtggccgaccacaacggtgggttacctggctaccgcgaagggggatccggagcgggccagcctggagtcgtcccggcgtgctgtacgtcggctgagtggggagacgtgacggagtgaagtggaatctgcgctgggtggcggccggaagggacatctggcggcccagtgatctgaagaccgcgtttgaggcggtcgggttcacgccgtcgctgagcaaggtgtgtgcgctgtggtcgcaggcgccggtgactgtgcggctggatgatctcgacatgatctgtgccggcctggagtgcacggtcgcggacctgatggaggccgagtcgctcgccaccgaggagagcggcaggcaggacgggcagcaggcggtcggcgggagcctgcgctcgggcagcggtggccggccggtgccgaagcagtctggtggcaagggcggtctgcgtcgtctgccgccgaactgagcatggcgtcgcggaaacctgccgggtggcgcccgttgtgcacgttcacacgtgctcacggcaagctcatccgtggccgcgccatccctgaccttgcccaagtccagaccgtgctcgaggagatggccaccgagcgcggagtcggcgagacgtggcgcttccacaccagtgagggtctgcggcttgcgctggcctcccgaccgccggacgagcgcctggtgcgtcccgaggcgctcgtggatctgccgcagatggggcccaccctgcacgcggctctgaagcgggccgggatgcttgcgccgctcaggccgcggctggtgcccttctggatgtcagcggatgtggggaactgccgcgagtgcctggcctggacgaacgagcgtgatcagcggtgtgcgtcctgccagaactgggcgatcggtcggccgacgggcccgtgccaccgctgcggtcgaaagctgccactcagggacgatcaccgccgaagctgtgtgctgctgatcgccgagaccgagtacgacgtcgacggcatccttctcgacggaggcgaccagctctggttcggcggccccttcgccctgcacctgatctgtacacgcgcccgtgaaggcggtctgtacgggcgccggcgcctgcagatcaagcggcgcgaagccgtggcagcgtcgcgggccgctcgccccgtctccgtgcatctcgcgcggcccggccagctggagttgttccacctggcccgcgactggaaccggctggacgaacgccgccttcccgccctgacaccggcggccaaggaggtgctcgacggcttcgtcacccacatccgcgcccgcggctggacgatgcaggccctgggacccagcatccgcaccctacgtgtcctgctcgcctacctgggaggcgaagccccgctgctggaggaggatgtgcgcctgctggcccgccgcagctgcttcagcggcgcgcgggtgatcaattactggcgtccgaccggccgtctcggccccaaccacagggcaaacgcgtacctggcccgggcccggcgcgcggctgatgacgcaccgggctccttccgccccttggtacaccggtggatcgacgtcctgtgcgggcaggcctctcagcccagctggccacttgcgccttccacggtctcctcccatgtgcgcctggccgcacctgtgctgtgcgcgtggtgcgcggacggcgtcatcgatctgcgggccatcacacgggaagacatcggggcggcactccagccgaagcgggggcaggccgcatcgtctctggccaccgcactgcgctcactgttccgtgcgctcaaacgagaaaggctgatcttccgcgatccggcccgaggcgtctccaccacgagcgccgttaccctgcccgggccactgcccgacgaccgcctgcggggcacgctcgaccgcatgccgtcagtgcgtcaccagctcactttcgtcctggccgccgtgcacgcgctgagcggccatgaccagcgccatctgctcctggacgacctcgacctgagtcgcggcacgctcctcgtacggcgccgggacaagcccgttcacaccctctacctcgacgacctcaccttccgcctggcccgacggtggcgggccgaacgccatcgccgttggccgaccagcaccaacccctacctgctcgtgaccgtgtgcactgccgtcgacgacacccaccccgccgtcagcccccaggcgatcaccaaatcactacgccggctgggcctgcaggtcggacgcctgcggatggaccgcattctcgacgaggccaaacacactgccgaccccgtccacctcatccgtctcttcggcctgtccccttacacagccaggcagtacgtccgagccgcgcacccatacggcggaggcccgagcccactgtgatctgccgaaggcggaccgtgtgtggtcaacgtccgctcgccagacggaccatcgagagattggcgccgtcgacgcgggcatcggctggctcggtcgcactgggcggtctcccaagctgaccagactatggcgatctcagcgtgcgatctcctgacggagttgggtgagggcgcggtgaagtgtgcttttgaccgttccgggggccatgccgagagtggcggcggtctcgaacgtggtcatctgctcgcagtaccgaagcacgacgacgctgcgctgcttgggggtcagacgcttcaggacttccgtcaacaaggacctgtcggcgtgctggtcgctggtgtccttgacggacgcctcgggtatgtgtgcggtcggaatttcttccagcttccgtgcccgccaccactccgtgcgcgtgttgatcatgacgcggcgcaggtaggcgtccgcgagccgtttgtcggcgatgcgtccccactggcggtacgtgcgtaacagtgcgatctgcaggaggtcctgggcgtcgagtgggtcgccgaccaggcgccgggcactgcgcagcagagcgtcgtgccgggtacggacgtactcctcgaattccagcaccgcggtgcgatgcttgcggggatccatgcgtgggctcctttcacacgcgggcatgagcggtcagtacgtgctgtgtggcggagcgacaccgagtgggcaggcccgcccgtcccggcgtcggctcaggctcggtaccgtgccggccgagtcgtcaggtcgcggtgccgtagcagtagtcgcacgcgtagccgacggtggagcgataggtgcaggaatgaacggcggcagcttgcggggccgacttggtcgcctcgctgccggcggcggcttgaacagccatgacgggtacggtgacgagcagtcccgtggccaggaccagggcgctggcggcgcgggtgcggtggtacggcacgggcatgtccgtctccttgtgggaagcaggggtggttggggttggtggcgggctgtcagcagcccggcagatgggggaccttgggggccgctcccgcgtacgtagtggttgctcacccaggccgggtcgctgccgtgcagcagggtgaccttcgtccaccacttgtttcccgcaaccttggtggtgtgccggttggtctggcagaacgcccgcagggtcgcatgggacacccgtgtgacaacccggcaacccgtgcgcgggcactcccgcagggccacctgagtgcccttgatacggatcttcctcacgccggcggccgaggtgttgtcggacaccggcaccagggtggaggtctgggcggccacatgctgcgcgccctgcgcatcggcgtgtgcggaaccggccacggccaggccgccggccagagcgagggcggtcgcggccggcgcgaagctgctgcgcacagtagaggacattgctgtactcctctcactggcgccgcacttcgcggcgcacttgggtcgttacagcggcagaccgggccgatcttggggcggtccgtgacgggttttgggcaacggccttccgcccgaacagggaggaggaccgggctgctggccgctcccctcgcgccggccagcagcccggcctccggaattgacggcccgtcatgatgggccgcctaccggggaggtgggtcagtacgagcgcctagtggatcctttggcagccggtcagtacggctcgctctgtcgtttctcggacccgtcgtcaagtcccatgaccacgtggtagccaggcccgtcccagtaccaggcggtctgatggaccttgtcccttcgcagaaccccgtgcgacagagtcttgtactctccgtggcccttattgcgccacaggtagtaggcgcagatgccggcatccgtcctcttgcggaacgtggcgaccacgaaccagtgtccgggcgccgtcttcttggcgtcgagttgggccgtgcactgaagattggagaaacggatgtgccgcacgtcggagtagtactcgatgaccgtcggcgatgcgggccttgcctgagcgggttgccctgaagccgcagcgcccggcccgccgctcagggccagggcggccacggccagggcgatcggcttgctgatggtggtgatcgacaccaggtgctccttcgaacgaggggctgctgccttccggaacggccgcgtgtgagatggcggccggtgaacagccggacctgacgtgcagatccggtgccgtacgacctcgactttcccggccgcgccattgaatggacagccggagccgccaccctgatcaatggcgacgtcacaggtcacgggcacggcgcagcacgctgaccaaaaagcgcgcgagagccgttgacggcgtggcgtcgggaacgccctgccaggcgacgactgtggcagccaggggctgtggagaagctgaaggtttctgaaagaaaggctcgtgcgccaactcccggacggtgtccggctcttcaggttggccacaggtggattccctcatgctggagccatgcgcgtactggtggttgaggacgaccggcggatggcggagctgctgcggcgcggcctggtcggtgagggatgggcggtcgatgtcgtgcacgacggaccgtcggggctcgagcgggcgggcgagaacccgtacgacgcgatcgtgctggacgtgatgctgccgggcctgaacggatacggagtgtgcggccggctgcgtgaggcgggcatctgggcgccggtgctgatgctgacggcgatggacggggagtacgacgaggcggaaggcctggatgtcggtgcggacgactacgtgaccaagccgttctcgttcgtgacgctcctggcccggctgcgcgcgctgatgcggcgcggacagccgcaacgccccgccgtgctgcgcgtcggggacctggaggtggaccccgcggcccggcactgccgtcgcggcacggtgccggtggccctgacggtgcgggagttctcggtcctggagtacctggcgcggcgcggcggtcagacggtcacgaagacggagatcctggagcacgtctgggacgaccggttcgatggagacgtcaacgtggtcgaggtctacgtcagcgccctgcgccgcaagatcgacacccccttcggacggcggtccatccgcaccgtccggggggtcggctaccggctcgacgttgccccggagggcgcatgctgagggctcgtcgggccgggcgagccgagcgcggtctgcgcctgggcagcgtgcgactgcggttgacactggccgcgaccgccctggccgccgtcctgctgacgctggccgccgtcgccagcgccgtcgccgtgcgcaactcgttggtggcctcggcgatcgagcgggtcaccaacggcacaagcgccgaggtggccgagtcgcccgtgtgcgaaaccggtcccgacaacacgtcctgcgtcgaaccgcctcccgactcgtcccccgacccgcgtgacacgcgccccctggtccgaggcgaacacctgtccctgtggccatggaccgacccgcacgacgccacgttcgtcgcatcggaacaggccgacgggacgttcccgccggacgtctgggcggaccagcaacgcctgaacaccaccgtgtggcggctcgccggcggcacgctggtgctcaccctggtgactgccggcgggacatggctggtcgtcagccgggccctgaaaccgttggacggaatccgcaaacagttcgccgcactgagcctgagcagcctcgaccagcgcataccgacggcgcgcggcggccgggagttcacgcaactggtggcgacgatgaacaacgccctggaccggctcgatgaagcggccgcccggcaacggcaattcacctccgacgtcgcccacgaactgcgcaccccgctcgcctgtctgcgcgccgaactcgaactcgcgctcgccccctccgggaacgcccactggcccgacgccgcccgtgacgctctgcacgacactcttcatgtccaggacatcaccacgaacctgctgctcctggcccgcctcgacgcccaagccccacactcgaagaccctcctgaccaagcaagtcgacctgcccgacctgatccgcgacgcggtcgcccgccgtgacgtacccgatcacctgagcctggtcgtcgccgcacccgacgaacccgtggccgtgaccggccacccgggcctgctcgcccgcgtcctggccaaccttctcggcaacgccgaacgccacgcggccaccaccatcgccgtcgcgctcaccctggaccacgaacgccgacaagccgtactcgacgtggccaacgacggcccgcccatctcgcccgaacaccgggagaccatcttcgaacgcttcagtcggctcgacgacgcccgcacacgggacgccgggggcaccggcctcggcctggccatcgcccgccgcatcaccacactccaccacgggaccctcaccctcgcccccagccaggaagaccaaccaggcgcccggttcaccgtacgactgcccctcgcccacgaggacgtcctgccgctggtcaccgaactcctgcacgcttgggaccagcccgacgacatccccgaactcttcacccacaacgccggacaccagcccctcgaagacgtcgtgcccgacctggcacgcgccctcatcacagccggacgcgaccaccacctccacgcactgctcctccacgtcgcccggaaggcacccgcctgggaagtcaccggcctcgccgacatcctccgcgacgaaggcatgcccgcagccgccgacgaactgctcgccgcccgcaccgcacgtgttcgttgaaccggcatgaccatgggctgacttcgcgtcctcgggcccggcagcaagcggcgcacgggcacggcgtggacacgtcgaccacatggcggcgcccacgaccgctcgaccttcgctccacgatgggggcctggccacccgtcgagggatgtgcgcgcatcttgctgccgacgtccgactgctggtcagcgccgccgcccatgactgcgcgtggaggtctcaagtacccgcgggcgcgttcttgcaaaatacgggcggaacggcccaggatccgcagcgcggtagccggtggcaggaccgcgagctggccgatcgtttccaccccgaggcgccgaagttcgacagcctggcctcggcggatgccataaaggtcctcgatcgcctgtggcgccaggaactgctccgtttccgatggcgccacgtactggatgccgcccctccccgggcgggctgaagccatggccgcgaccgaccagcacggcccgatgcccaccacagtgtccagcccgaaccacgccagagcctgcagccgtatccgttgcgcgagctcgaccggccctgccgcaaacagccggagggcaccaccagcctgagcaacagcagcgccaggcggcaacgcctgcacgatcggagtgaaccgccccaacacggtcatcagcccgggtagcccgccgcgctgccgcagcagaacatgaacgaacgcggcgacctcggtcacctcttgatcacctccccagtcactcggcgaaccggacggcgccttgcctcatccggcggggaccagccggtgtgttcacgaactgcggtgtgcgggaatctgcgagctggtcggattcatctgagcctcggcccgaaagctgccgccatcgcggaacccgtcgtgcggcggagccggttcagtcctggtcgttcgcgttctgttcggcgtggcggtggcggtaggtgtcgatctcggccatgtgttcctcggcccaggaccggagcgcggcgagcggcacctcaagagacagccccagtgcggtgatccggtagtgcacgcggggagggacggtcggctggactcggcgggtgaccaggccgtcgcgggtgaggtttcgcagggtcgccgacagcatcttctgcgacacgccgggcatcctgcgctggagctcggcgaagcgcacctcctccggggcggcctcggagagcaccttgatcgccatggacgtccatttcgtgccgatcctgtcgagcagccggcgcgtcgggcagtccggttcgaagaggtccccgcgtgcggtgaggggacccgtcgggcgggtggtcacctggagctcaccgtctttcgtgaaagtgccgtcttggtacgtcaactctagtcacctaggttcaggttgtaaccaatggttatcgcttggagttgatgtgatgtcccacgtgtcgcccccgccgcccgcccgccacgccgccggtccgggcaaacatccggacgtggagatacgcaccgtcgccgtcaacggcgtggcactcagggtggccctcgccggcgagggccccgcactcctgctgctgcacggcttcccgcacacctgggaactgtggcgggcggtcatcggcccgctggcccgacgccaccgggtgatcgcaccggacctgcggtggctggccaccggccgagaagcgcccgcgggggagcccacgggagcgggatacgacgccgcgacactcgcacgggacgcagagtgcctgctggaagcactcggcgccacgcgcgccgctgtggccggcatcgacgcgggagcccctcccgccttcctgctcgccctgcggcgccccgacctcgtccggcgactggtgctgatggagtcgctcctcggcggactgccgagcggcggtacgggcgacgggtggcccgcggcgggcgggccccggtggtggttcggcttccactccgagcccggtctcgcggagtccgtgctgaccggccacgaggaccggtacatcggctggttcctcgaccaaggcacgctcggtcgcggcgtccccaccgcgctccgcgaggcgttcatcaccgcctacaccggtgaggacgtcctgtgccgcgccttctcctactaccgcgccctgcccgccagcgcccgacagctccaggacgccgccgccacggcccggctcacgatgcccaccatggccgtcggagcgcaccccatcggtgccgcgctcgaacagcaactgcgcccgatcgccgacgacctgatcggccatgtcctcgaggactgcggccacatcatcccgctggaccgccccgcggccctgctcgcactgctccagcccttcctggcggccgacatcaccacatgagggcggccatggccctgactccgatcgaaccggccgcgccggcagagggagatgacgcagcagagcctccaggaggcgaacacccggatggagggcgttgtcgaggcggcgtatgccacgcccggctccgagacgaagttcaagccgtactgggacgcgtacaggaccagcaccgacaaggccatcgagggcttgcagggcgtcagcgacgtgcagcaggtctcggacgctttcgtgggcccgacgaccggaccgccggagtagccgccaccggagtgaccgccgccgtggtggtggttgccgtgacgcgcgccgtggtggcggttgtgctcgccgcggtcggcccaggcgccgggccccttgtggtcgcgtcggccgacaagcgggtcgcgtacgccactgccgcgcgcacccggatgcgctcctcggtgctcatgggcgtgccctggacggcgtgccgttccagcgcggcgatggtgtcgcgggagatggcgagggctgcctcgatcgacatgctgatctctccgagctggaactgtgtcaccgggcttgtcgcctgccgagccgggttctcgaacgacgtggcgcgttcgggagcacgctcgacgaaggactccagtgcgccctgcgcgatgccgatgggggtgcccacgctcgcggagagcaggaacgggaagaccgcataggagtactcgacgactcctgcgttggccgcggaggcgtggtcgcctcgcagcagtccggggagaggcagggcccggtcgtgcgggacgaaaacgtcccgggcgaccgaggtgctgctgcccgtgccctgcatggcactcatgtgccagtcgtcgatgatctccatctgggtggtgggaacgacggcgagatacggctcgttggcgccgtcctcgtgggccaggacggctgccagaacgttccacgtggcgtgcaggacgcccgtgttccagggccaccttccggtcagcaggtagccgccttcggtgggtacgagtgttccgcccggcgctgacactcccgcgacgcgggctcctgggccgctgaacaccagttcctggaccgggtcggggaacaatgccgcccagtagccgcacacggcgtacaacgccatcacccacgatgtcgatccgcacgcacgggcgatggtgcgcaccacttcgaactctgtcgccgcgttcacctgaagaccgccgaaacgcctgggcaccgtgagccgggtgatgccaagggtttcgagagcctcgatgccggcctcaggcagccgccgcagccgttcggcgtcggcggcgttctcacgcagcatcgggagcaactcctcgacggaccggaccaaagcgtggtcgacacggtccgacagcgtgcggaactccggcacggtggtgctcacgtctcctccagaggggttcggctcaggaaacgcggcacctccgcgttgccgagcctgctgtgtcaccgggtgctgtccggcaccgcgggcactcggcggaccgtcatcctgatccggtcgactgctcacccgacaggtcaatgactgctcgatcggtgtcaggaccgccgtggcccgggaccggctgccgcccgttgccccgcgcccgccgcgtcgtcgcggacccggacgtgctccaggagttcgacgggtgcggcgatcaggttggggtcggtgtgggtgtagtaggaagcgtccgcgacgtacaccgtgtcgccgcggcgtgcgagggacgtggggttctgcagcccgtcggcggcggtgagcaccgcggtgtgagagccgtcgggacggatgagttcgacccggttgccggcgttgtcggcggccagcacgtcgtcgccgtggccggtgaaggtgaagtcgtcgactgctccgagtccggcggcgacggtgtgcacggtgccgggggtgccatggcggccgatggggacacgcagcagtgtgcccttgtccatggtggtgacccagacggcgttgtcgcggatcttgagtccgttggcgccgaatccgctcggtgtgcgtgcggcgagctcgggcgccttcttccagaccgccgcggctgtgccgtccggcgtcatgcgccagatggcgcccagcgaggaatcggtggcgtacaggtaaccgccatgcagggcaaggccgttggggacgctgttcgccggcagggggaccacccggctggggacgtcgcccgggcggagcctccacaggccggtgaggtcagcggtgccggcggaataaaggacgtagagggtgccgtcggggagccggacgatgccgccgatgaaagcacggccggtcaggggtgcgtcggttccggtcggaggggccgggagcgtgcccaggacgtgcgttccgcggtccgcggtgaggcggacgatctggtgcgcgaaggacatggtcacatcgagggaaccgttcggttcggtcgtcaggttctccggctgctggccggccgccaggtcgaggtgcctgatgatgtgcgggctgccgaggccgggtgtcccggcggacgcgggcagggcggcgccggcgaacgcgacgaccgtggccgtggcggtgatccgtattctgctgctgatgcgcatttctgttctcctgagaaccgtcctggacggacggacggacgggtgcgggactgcgggctgttgtggctgatgctgtggcccggcgccgcactggttcttgccgtgcgcggcgatggacagcggctcccacgcgcgccacgtcgccgaggaagaagcgcagcggcgggcgggccgcgtctacgatctgcggtacggcgtcccgtgtcgcgaccggatcgccctgcacggcattgcgctcccgccgggcttcctgggcctgctcgcggtgaactgggcgacctcttgagcgagtgactggctgaacgtttccagcgcccacttcgacgcggcgtacataccgacgttcgggaaggcgccgacgccgctgatcgagctgacctgaacgatgtgcccggcgcgctgtgcgcgcaggaggggcagcgccgcctgggtcacccacagcgcaccgaacaggttggtgtccaactgcgcgcgggcctcggactcgctgatttggcgccgatcggatcgagcaagggctgcgagcagtagaggttggccacggtcagcccgccacgccacggccggcgcgagggccaccgtacggctcaccgcctgtggcacggccgatccgggcacacccgctgtcctgtccatgttcttccttctccgcctctctgcgtcgctacgaagccggcgcctcgtacggaaacagacgctacgaacgccgtgccgggcggagaagggtgtgccgcaccccctcccaggcagggtgcggtacacccaggctcggcgagcggacgacctggttcgggcccacgacccgcgtgaagcgggcagcgtgctgggcggctccagcagcatcaacggtctcgtgcatctgcgcgggcaccggtccagctacgacgcctgggcgcggacggcaacgggaagcagaccgagggagtgtcgtggaccgggacgaacgtggtcgccggccggcggcagagcgcggccgacgcctgtctgcgcccggtactctcccgccccaacctgacgttgatcacccgcgcacacgtccagcggctggtgctcgacgggacccgctgccggggatcgggcccgcgacgcatccgcgggatctggggatccctgtgcgcgccgaccttcccggtgccggggagaacctccacgaccatgtactgagctgggtgtcgtaccggacgaattggcaccggcagaaggtcgcgggcgtcgcccccgggcccgtcgtccgttcacagcgccgtgggtgccgcacaccctcccgggcagggtgcagcacacccaggttcaggacacggcgcgccgttacggtggtgcgtatgacgagggacaacgaactcggtgacttccttcgcgcacgccgcgacctggtgtcgccggtggacgcgggcctgccgtggcacacctcccgccgggtgcccggactgcgccgggaagaggtcgcgctgctcgccggggtcagcacggactactacacgcggctggagcagggccgggaacggcacccctcggagcaggtcctggaagccgtcgcccgtgccctacgcctggacggcgacgccaccggatacctgttcaggctcgcccaaccggctccgcggaccgcggtcaccgacccggcgcggacggtcagcccggaactgacccggctgatgaaccacttcctggaccttcctgcctgcgtggtcagccccgccctggacatcctggccgccaatcccgcaggtcagcagctctacagcgggttcgaccggatggacaacctgctgcgcatggtcttcctggaccccgccgcccggcggttctaccgggactgggatcatgccgcccaaggcgtcgtcggcaacctccgggcgctgtcggcccccttcccgaacgacccgcgcgtcgcccaggtcgtcggggaagtgtcgctgcacagccccgcgttcgcggccctgtgggccagatacgaggtccggccccgcaccagcgaggacaaacacctgtggcacccgctggtgggcgggatgcgcctgcactacgaggcgttcaccgtcaccagcgcgcccggccagcagctgttcgtctactccgcggaaccgggcactcccagcgccgacgcgctggtcctgctgcggagcctggccggtgacacgctcgccgagcactctgcccccggcgtcgaaagccgtaccgcccgctgacgcctcgatcacggagagcacgtacagacgtgccccggagagacgggcatcgacttccccggcactccggcaacgatgaccggcgctgctcggcgatatcgaactccccgatctgcatgaggaccctatctgggggtggcgctttcccgggcggcgtcttctcggtgatcgccttcgagcgccgggctggtaccgggtgatcacatccgagtacgaccacgtcatggaccgcgacgaacccgtgatgctcgatcagctccgggagccgctggtcaggctcgcggggccgccccgaagtgagcgcactcgtccggcacgccctcccggaccagttcggtaggggaatcgcccgcgcgtacagctttggccgatgcctccgtcaggaatccccttgccctcattgcagcgcaagcgcagttgccgcggggcgacggcgttcggccggggcccttccggcgtctctccgctcgggagaccaggccctggcgagccattcgcaccggcccgtaactggccgaacccgaaattcgtgcagccccgttttacgggcaactcctcgcccatggtggcacagaagtcggacagaactcaggcacaactcaggcacaactcagtgggatgcagctccgggccgacgaaccaggaggccagcggtcctgcccttgtggcgttggcggtcgggtctttagcgtggcgtcagcatttcagggtggctgcggatgccgggtgtcctgtcgacaggacgacgccgatctgtgaacccgcgccggccctgcgattcccctttcgagtcatcccgtgacggattaggacggtggcagtgagcacgaacccctttgacgacgaggacggccgcttctacgtcgtgatcaacgatgaggagcagcactccctgtggccggtgttcgccgaggtgcccgcgggctggcgggtggtcttcggcgaggcggccagggccgagtgcctggagtacgtcgagcagaactggaccgacatgcgtccgaagagcctgcaggaggccatggcggcggactgaacgccgctcgcatccgacgggggagtggaacacgatgtccgtatctcgcctgtgccgagcgcccggcgcagagcggggcgtcgagccgatgcggcggaatccgtcgacatcgctcacggccaacggcggtgacgctcacgggccggccgggagccgtgggccggccggcggcgggctcgcggacccggccgggacgacgctgctcggtcccatgacggccggccgaagtggagacgtcccgtgagaaccgcgagcagtcacacggcgcggccggtgggcaccagcaatgagcccgagcggcgcatcgggaccagcctgcgcgagttcacgaactcctcggcgtggtggctcggcgaccggtacgcgtgggcggcgcggtggttcgacaccaccgcagaccggaaggcctcggcttcgcccaccacgccgaggtgacccgcctgtcgccaccggagcaggaccactgatcgagcgaggctcagcagcagaggcggtcgcgcaacgaactccgcggggcgttcgcgccggcctcgccgagcaggaccactggaccgctgtttccccgagcggcggcaacgagaaccaacgggtgccccgaccgaccgattcggcgggcgccgacaagcgccggcgaaaggccaccacgctcaccatcgagcgggtgaccgaggtgctcgacgccgctgagcggcgcaccaccccaagcctcactgcccaaaggctcaccgccccaaggcgccggacaagcccccgtccccgtggtgcgccgccggctcgcccgaccggacaccattcacatcggagtcagttgatgattcttcagggaaaacgggttgccctgccctcggcgcccgtcgtgcacaagcagttcgaggcgcacgtgaaggcgacccccgacgccgtcgccgtcgtctgcgccggacagcgggtgacgtacgcggaactggacgcgagggcgaaccggttcgcgcacttcctcgccgcgcgcggacacggccggggcgcgaaggtcggcgtctgcctcgactactcgaccgacatgctcgtcgccatcctcggcacgctgaaggcgggcgcggcctacgtaccgctcgatccggcctacccggcggcgagactccaactgctgctggggcagatccccggcctcgccctgatcgtggcctccccggcgacggccgggctggtggagtcggcggccgccgaggtcgtcgatccgcagcagctctccgatcagccggccggcctcccgacgacctctcctgacgtctccgtcaccggggacgacgtctgctacgcggtcttcacgtccgggtcgaccgggacaccgaagttgaccgcggtgcggcacgagggctggttcaacctgatgaactggctgatgctcgagtacggcctggaccgcgggtcgcacaacctggtcgtcagcgcgttcgggttcgacctctcccagcgcagcctgatgacgccgctgttctgcggtgccacccagtacctcatggcgagccggaacttcgacgcactgatggcgtaccgcatgctgaccgaccacgggatacgcacggtgcactgcgcctccagcacgctgtacctgctggtggactgggagaccgcacgcggaggtgaggcgctcacccggctggactacgtgctcttcggcggggaaccgctgaaggtcgaaaggatcgcggactgggcgcggcgcgaggggaacaggtgcaccctgctgcaccagtacggcgtcgccgagtgcacggatgtcgcgacgtcgtacgacctcgccgagtaccgtcccggcgaacatgacatcccgccggtgggcaggccggtccacaacacggagatccacatcctcgacgaggggatgcgtggtgtcggtgaggaggagtacggcgaggtctgcatctccggcagcagtgtcggcgcgggctatctcaacggcacgggtcccgagtccgagaagttcacgacggtcacggtcgacggcgagccgcgcaggctgtaccgcacgggcgaccgcggctacgtgacccgggccggggaactcgtcgtcgtcggccggatggacgcgcaggtgaaggtgcggggcatgcgcatcgaccccaccgacatcgagcgcgcgctcggcaggctggccggggtccgggaggccgccgtggtgatcggccacaccgacgccggcgaggtggaactggtcgcgttcatcgtcccgtcggaaggcgagctcgccgagagcgacgtgcgcgcccgcctccttcggacgctgccgcggaacatggttccggcccggtgcgtcaacatcccccggcttccgttgagtccgcacggaaaagtggaccgcaaggcgctggtcgacgcgtgccggaacgagttcgccgtgcgcggcacgacggcgtagccgccggaccttgatgacaaccgagaggactgtgatgattgccgacaaggtgcgtgccatttggtgccgcgaactccagcgcgatgacatatcggtcgacgacgatttcttcgcgctgggtggccagtccgtgatcatggccaaaatccagggtgctttcatcgaagagctgggcgtcgaagtcccggtggaccagatgttcctcaacccgacggtggcttcgatttcttcgtatatcgagtccatgggtgcggtgaccccctgacctcaggcgtcgttggcgcccttccatggttgtccggccatgactgcgttggaatccaagaaccactcggtatagagaggcgccatgtacgacgtcattgtcatcggtgcccgttgtgcgggttcgccgacggccatgcttttcgcgcgacagggttatcgtgtcctgctcctggagaaggcgcggttcccgcaggacacgctgtcctcgcactacatccacacggagggcgtggcgctgctcaaacggtgggggctgctcgacgcgctccgcgacgcgggctgccggccgatcgaccaccagagctacgaggcgccaggtgtccgcatcgacggcttctccctgccgatcgacggtcagcggacgacatatgcgccgaggcggtacgtgctcgacccgatcctcgcgggcggtgccgtggcggccggcgtggagttccgggagtcctgcgcggtcaacgatctggtgttcgagggcgaccgggtcgtcggggtgcggtacacgacgcccggcggcgccgaggcgacggaccgggcgcgcctcgtcgtcggcgcggacggcatgcgatcgctggtggcccgcaagaccggcgcgccgaacgtcatcgagcacccgcggatgacctgcacctactacagctactgggccggggttcccgcgcacttcgagctgtacgagcggcaggggcgctggatcggtgtcatacccaccaatgacgacctcgcgctgctcatggcctacttcccgcaggacgagttctccgagatccgcaaggcggtggaacccgcctacctcgatgccttccgcacgacggcgcccgagctgtacgagcggatgtcggcgggcgagcgcgtggagcagctgtacggcaccgggcaccaggagaactacttccgcaaggcattcgggcccgggtgggcgctggtcggtgacgcggtgaaccacaaggactccatcaccgcccgcggcatcaccgaagccttcgtccaggcccagtcgctcaccggccacatcggggagcggttgcacgacgacgcggcgctggaggacgcgctgcggcgctacgaggacgacctcgacgacgacgctctcagccactaccagggtgcgctcaacgtggccgagctcaagcccgaggggcgggccgagttgctgcggaaactggtcggtcaccaggagctgatcgaccggtacttctcgacgctgtcgggcgcctgctccatcgacgacttctacaacaccgaactcttgacgctgctcgaccagagctgagtgacggctcactccctggtagttctgccgatattggagacacaatgatcccgttgtcgttcgcgcagcgtcgactgtggttcgtggaccggttcgaaggtccttcgccggcctacaacggccctctcgccctgcggctgaccggtgagctgaacgtaggcgcacttcaggcggcggtcggcgacctcatcgaccggcacgaagccctccgcacggtcatcgtcgaggacgacgacggcgtcccgcaccagcgggtgctgccctccggtcagaagcggttcggcctgcgggtcgtcgaggccgcgacggaggaggagcgggcggcggcggtcgacgaggcggccaccgggaccttcgacctggccgccgacgtgccgatccgcgccaggctggtgcggcgcggaccgcgcgagcacaccctggtgctggtgatgcaccacatcgccgtggacggggagtccttcggaccgctgtgccgcgatctcatcaccgcctacacggcccgccaggagggcagggctccggcgtgggagccgctcccggtgcagtacgcggactacacgctgtggcagcgggacgtactcggggacgaagccgatccgcacagcctggcggccaggcaactggagtactggcggcggacgttggccgacctggcgcagccgctggcgttccccaccgatcgcccgcgcccgaagacgatgagccaccacggcgacatggtcccgttctcgatcgaccccggcctgctccggtccgtggagaagctcgccgcgcaggcggacaccacggtctcgatggtcatgcagtccgccctggcggtcctcctgcaccacctcggctgcggtgacgacgtgcccatcggcgcaccgatcgcgggtcgcaccgacgaggaactgcgcgagctcgtcgggttcttcgtcaacacctgggtgctgcgcgtcgacctctccgggaacccgaccttccgcgagctgctccagcgggtgcgggagcgggccctcgccgcgtacgacaaccaggacatgccgttcgagcggctggtggagctgctgaacccggaccggtccaccgcctacaaccccctcttccaggtgatgctcgcctggcagccccccataccggaaccggagttccccggcctcgacgtccagtccgagcggctcgagaccgcaacagccaagttcgacctgttcttcgacctgatcccgcacggttcgggcggggcgcggtgccgtctggagtaccgcaccgacctgttcgacagggacaccgtcgagggcatcgcgaaccgcttcgtccgtgtgctgggccggctcgtggccgacgcggaacgcaggatcggcggcatcgacgtactcgacgcggccgagcggggccggctgctcacccagttcaacgacaccgccacggcggtgcccgagctgacggttccggagctgttcgaaagccaggtcgccaggacgccggacgcaccggccgtcgtgtgcgacgaccgcacgctgacctaccgggagctggacgagcgggcagacggcgtcgctcgggagctggtgcgccggggtgccgggccggaggacctggtggtcctcgcgctgccgcgcacggaggacctggtggccgggctgctcggcatcctcaagtccggtgccgggtacctgccgatggacccgcagtacctcgccgggcgggccgagagcgtgctggccgaagcacgcccgcgcttcgtggtcaccgacaccaagacgtcgcaggacctgccgccgaacgacatgtcgagcatctacctcgatgaccgcgcgcagtgggacgcgcccgtgaagacgccggacgacgggggccggatctcgccgccgcgcccggacaacctggcgtacgtgatgtacacctccggctccacgggcaagcccaagggcgcggcgatcacccaccgcaacgtcgtcaacggagtgcgggaactgagtcgcgtcctggacgcgccgcccggctggcggatgctggccggcacctcggtgaacttcgacgtctcggtcttcgagctgctgaccaccctgtccaccggcggcaccgccgaggtggtgccgaacgcgctggcgctcggcgagcgggactcctgggacggccatgtgatcagcgcggtgccctcggtgctcggggaactggtcggccacctggagaagacgacggacgtgcgcacggtcgtgttcgcgggcgatgtccttccggcccggctggtgcggcaggtgcgcgaggccctgcccggcgtgcaggtggtgaactcctacggacagagcgagagcttctacgccaccacgttcgcccttccggcgtccgaggagtgggcggagagcgaggtcgcgccgatcggcacgccactgggcaacatgcgggcctacgtgctcggcccgggactcgccccggtgccgcagggcgcggtcggcgagctgtatgtggtggggacctgcctcggccgcggctaccacggccgcccgggcctgaccgctgagcgctacgtggcgaacccgttcggccccgcgggcgagcggatgtaccgcacgggcgacctggcgcgctggaacgcgcgtggccggctggagtgcctcggccgcggcgacggccaggtgaaggtgcgcggcttccgtatcgagacggccgaggtcgaagccgcgctcaccgcgcaccccgggatcagcgaggccgtggtgatcagccgcgacgtgtccccgggcgggcggcggctcgtcgcgtacgtggtgcacgccggcgagggagccgtcggtgacgacggcgccggcggcatcggcgatgtggacgtgctggccggtgcctcggccgccgagctgcgcacgttcgtcgcggcccggctgcccgactacatggtgccgtcggccttcgtggccctcgaccggatgccgctcgggccgaccggcaagctggaccgctcggcactccccgagccggagttcgtgggcgagggctaccgggagccgcgtaccgaagccgaggcgatcatcaccgtcgcgtacgcggacgtgctcggtgtggagcgggtcggcatcgacgacgacttcttcgcggtgggcggggacagcctgcgctcgatccaggtggtggcgcgggcccgggcccgcggcctggacctcaccacgcgggagatcttcgagtgccgcacggcggcccgcctcgccgaggtggcctccgcccgccaggaccgggcgcccgcgctcgcggagctcgagggcggcggcgtcgggccgatgccgttgcagccggtggcgcggcaggtgttcgagcacggcggcgggatgaaccgcttcgccatgtcgatggtgctcgagctgcccgcgggcatcgacgagcgtggcctcgccgcgacgctggacgccgtgctcgaccggcacgacctgctgcgcgcgcggctggtgcgcggtgacgagttctccctcgtcgcacagccccagggctcggtgcgggcggcggacctgatccgccgggtcggctgcgacggccggtgggacgacccgtcctcgctggaggcggcgaaggcggagctggacgacgctgtcgggcggctcgacccggaagccgggaccatggcggacttcgtctggttcgcccccgaggcggggacgggccggctgctcgtggtcctgcaccacctggtggtggacggcgtgtcctggcgcatcctcatgtcggacttcgccgaggcgtggcagcaggtccgggccggcaggacgcccgagctgcccgccgtcggcacctcggcccgccgctgggcgtcggccctggaggacgaggcgctctccgcggagcgggaagcggaactggcgtactggcgcgacctgctggaggtgcccgaccccgcactgggcacgcgggtgttcgacccggcggtggatgtgatgtccacggtcgacaccgtgcgggtgcaggtgcccgccgacgtcaccgaggcggtcctgaccaggcttcccgcggcgttcaagggcaccgggaccgatgtgctgctcgccgcgctcgccctggcggtcaaccggtggcgcggtgcggaccgttcggccctggtccgtctggagggccatgggcgtgaggaggacgtcgtccccggggccgacctctcccggaccgtcgggtggttcaccagcatgtacccggtccgggtcgacgtgtgcggggtggacctggccgacgtgctggcgggcggctccgcggccgggaaggcgatcaagctggtcaaggagcagttgcgccaggtcccggacaagggcgtcgggtacgggctgctgcggtatctgaacccggagaccgccgcacagctcgccgagtacccggtgccgcagatcgggttcaactacctcggccggatctccgactccgacgtccccgagcacctgcgcgcggacggatggggaccggcgtcatggtccgccgagctgatcgccatgcccgatccggatctgcccgcgctgtccgcgctcgaggtcgcctcggtcgccacggacaccgtggacggcacccggttgcagacggccttcatgttccccaccgggctgctgtcccgcgagcggatctccgaactggccgagctgtgggtggaggtgctgcacggcatggccgcgcacgcggcacagcccaggaccggcggcctcacgccctcggacgccccactggtctcggtgcggcaggacgagatcgaggcctgggagacgcgctacggccggctgaccgaggtgtggccgcaggcaccggggcagtccgggatccagttcgaggccgcgctcgccgacggctccttcgacgtctaccacatgcagttcgtgctccacctgtccgggcacgtggacccggagcgcatgcggtcggccgggcaggcgctcctcgaccgctatccgaacctgcgttccgcgttcctcgccgcggccggcggcgacccggtgcaggtcgtggcggaccacgtcgccctgccctggcggcacatcgatctgaccggtcgcgccgcggccgagcaggacgcggcgctcgaccaggccctcgccgacgaccgggccgaccggctcgaccccggcaagccgccgctgatgcgcctggccctgctcacctgcgggccgcggcaggcgaaactcatcatcacggcgcatcacaccctgttcgacggctggtcctcgccgttggtgatcaaggatctgatccggctgtactccacggccggcgggctcggcccggtccgcggctacggggactatctgacctggctgtccacgcgggaccggaaggcgtcggccgcccagtgggccgccgagctcaccggattcgaccagccgaccctcgtggcgccgaacgctcccgtccaggaagccgcgtccgccctcgggcgggtcgaggtaccgctgtcgatcgacaaggggcgcgaactcgcccggcgcgccgcggaactcggcgtcacgctgaacacgctcctgcagggcgcgtggggaatcctgctctcgaagctgaccgggcggcaggacgtggtgttcggagccgccgtcaacggtcgtccggccgagctggccggttcggacgagatggtgggcctgttcatcaacaccctgccgaccagggcgtcgtgccgaccggaccacagcgtcgcgcaggtcatcaccgatctgcagaaccggcagaccgcgctgctcgaccaccactactacgggctcgccgacatccagcgcgacgtcgggctgcccgccctgttcgacacgatcgtcgtgttcgagaactacccgatcgaccgtgcgggcatcgtcgacgcgaacaccgcggcgggattcacgatcgacgccatccggccgttcgcgggctcgcactacccgctcaccctcaacgcctccgacccctacctgcggacctccctcgactatcagaacaacctctacgaccgcgaggcggccgagctgatcgccgcccggctcgtccgggtcctcgaccaggtgctcgacgacccgacggtgccggtcggagccgtcgaggtgctgtcgcgggaggagtgggaccggctggtgcgccgggtcaacgacacggcgcggccggtggccgcggatacgctgccgggcgcgttcgaggcccaggtggcacgggaccccgaccgtgtcgcgttgatcggcgagcgggagaggctgacgtacggggagttcgaccggcgagccaatcagctggcgcactggctggtcgaacagggcgcgggacccgagcagttggtcgcggtgcgcatcccgcgttccgtcgacctgatggtggcgatctacgcggtggtcaaggcgggcgcggcctatgtgccgctggacaccgagctgcccgaggaccgggtgcggcatgtgctggacagcgccgagccgctgctggtgctcgacgggacgcttccggacgtgtccgcgtacccgaccacgaaccccgagcgggtgctgtcgccggacaacgccgcgtacgtcatcttcacctccggctcgaccggcggcccgaagggcgtgcaggtgtcgcaccgatcgatcatgaaccggttgaagtggggcctggcgcacttcgacgtcggcaccgaggaccgggtgctgctgagcacatcggcgagcttcgacgtgtcggtgccggagctgttcgcgccgttgcaggtgggcgccgccgtggtgatcgcgcgtccggacgggcggcgggatccgtcctatctggccgagctgatccggcgggagcgggtgaccggcgcggacttcgtgccctccctgctggaggcgttcgccggcgagcccgcggcgaagcggtgcgacagcctgcgctggatcgaggtcgcgggtgaggcgttcccggcggcgctggcgaacaaggtcgtcgatctgctgccggactgcggtgtgcacaacctctacgggcccaccgaggcggcggtggaggtcacggcgtggcagcacgtgccgggggcggaccgggtgccgatcggcgcgccggtctggaacacccaggtgtacgtgctggacgcggcgctgcgcccggtcgcgccgggagtggcgggcgagttgtacctcgccggtgccggcctcgcgcggggctacctcggccggagcgcgctgaccgcgaaccggttcgtcgcctgccccttcggccccgccggggcgcggatgtaccgcaccggagacctggtgcgctggaacgaggacggccaggtcgagtacatcggccgcaccgacttccaggtcaaggtccgcggattccgcatcgagctgagcgaggtggagtcggcgctgaccgcgcacccggacgtcgacaacgcggtggtcgtggtacgcgaggaccgcgccgacgaccagcggctggtcgcgtacgtggtgccgggaggcggcagggcggatccgtccgggctggatctcgcggccctgacggatctggtccgtgggcgtctgccggagtacatggtcccctcggcgatcgtgccgctcgccgcgttccccacgacagcgagcgggaagctcgaccgcaaggcgctccccgcccctgaccacaccgaagccacggccggacgagggccgcgcaaccaccacgaggaagtcctctgccggctgttcgccgagctgctcggcgtggaggagatcggcatcgacgtcgacttcttcgaccacggagggcattcgctgctggccacccggctgatcgggcgcatacgcagcgagttcgacgccgacgtgaaggtcacgacggtgttccgccatccgaccgtcgcccagctggccgagcagatccagaagctggccacgtcgaaacgtccccggctgcgacagatgaccgtacaggagaaccgtcgatgatcccgttgtcctttgcccagagccggatgtggatcctccacaagctggaaggcccgtccgcgacctacaacgtgccgttcgtgctgcgcctggaaggggtactggacacgacggccctggccacggcggtgacggacgtcacgaaccggcacgagagcctgcgcaccctggtcgtcgaggacgcgggcggcacggcgtcgcagcggatcgtgactcctgaggaggcggtcttccccttccgtgtggtcgacgtggccgcggacgcggtggacgcggcgatgcacgaggtcgcgtgcgagccgttcgacctggacacggagctgcccctgcggacgaccgtgctgcggatcgctccgcaggagcacgtcctggtgttcgtgttccaccacatagccgcggacggggcgtcggtggcgcccttcgtcagggacctggtgtcggcgtacacggcccgccatcgcggcagtgcaccgcagtggacgccgctgcccgtgcagtacaaggactacacgctgtggcagcggcagctcctgggtgacgaaaccgacccggagagcaccgcggcggagcagatcgcctactggaagaaagaactggccgaggtgccgcagccgctgcagctcccgctggacaggccacggccgacggcggccagccaccgcggcggcgaggtccccttcgtgctggcaccggagctgctgtccggggtgcagaagctcgccgcggaccatggtgccacggcgccgatggtggctcaggctgcgctggcggtgctgctgcacaagctgggtgcgggggaggacgtgccgatcggcagtccgatcgaagggcgcggggatgagcaactcgacgatctgatcgggttcttcgtcaacacctgggtgctgcgcgccgatctgtcgaggaacccgtcgttcgccgatctgctggagcaggtgcgggacaaggccctcgccgcgtacgacaaccaggacataccgttcgagcggctggtggagctgctcaacccggaccgcaccaccgcttacatgccgttgttccagacggcgctgggctggcagttcgtgtggggcgagatcgagatgccgggcctgcgggtcacccccatccccgtgggcaccggcaccgcgaagttcgacctgctcttcaacatcgtcccgaacgcgtccgggggcacgcgcggcctgctggagtacgcgacggatttgttcgaccacaccacggccgaacgcatcgtcgaccggttcgtgcgcatcctggagcaggtgctcgaggacccggcggtgccggtcggcgccatcgaggtgctgtcggcgcaggagcaggactggttgctccggggagccactgacacggcgctgtcggtgccggagcgaaccgtcgacgcgctcttctccgagcgggccgccgcgacgccggacgcggtggcgttggtgtgcggggacgtgacgctgacgtatcgggaggtggacgagcgagccaaccggctggctcgggtgctgaccgaacggggtgtggagccggagtcggtggtcgcggtggtggtgtcccgatcgccgcagtgggtggtcgcgctcttgggagtgatgaaggcgggcggggcgtatctgccggtggatccggcctatccggcggagcgcgtggcgttcatggtggcggattccggcgcggtgctggtgatcggggacgcggtctcggcgggacaggtgccggagttgtccgcgcccatgatccgcctggacgatccggacgtggtcgcggcgctggccggcgccgacccgggccccgtgaccgacgccgaccggcgcggtccggtggcggtggccaatacggcgtacgtcatctacacctcgggttcgaccgggacgccgaagggagtggcggtcagtcactcgggggtggccagcttggccgcgtcgcaggcggagcggctcgcggtgacgccggacagccgggtgttgcagttcgcctcgccgagcttcgacgcctcgctgtgggagtggagcatggcgctgctgacgggggccgcgctggtgctggccggcccggacgagctggccgcgggtgacccgctgatcgagacgatcgccgcccacggggtgacgcacgcgacgttgccgccggtggtgctggcggcgttgccgacgggggcgttgccgagtgtggagacgctggtggtcggaggttcggcgtcctcgccggaactggtggcccagtggtcggccgggcggcggatgatcaacggctacggcccgacggagatcaccgtgtgcgccgccatgagcacggcgatggtgggtgacggccgtactccgccgatcggccggccgatcgccaacacccaggcgtatgtgctggacacggcgctgcgcccggtcgcgcccggggtcgccggtgagctctacatcgccggcccggggctcgcccggggctacctcgggcggacgggcctgaccgcggaccggttcgtcgcctgccccttcggcgcgccgggcacccggatgtaccgctccggggacctggtgcgctggaaccaggacggcgagctcgagtacctcgggcgaaccgacttccaggtcaagatccggggtttccggatcgagctgggcgagatcgagcacgcgctgacgatgcaccccggtgtggcgcaggcggcggtcgtggtgaatgagaaccagctgggcgacaagcagcttgtggggtacctggtgcccaagccgtacgccgccgcggtggctggtgccgacgctcaggtggatgagtggcgccacctctacgacgacagttatgccgattccagcgatgaggagttgggcgaggacttccaagggtggaactccagctacaccggtgagccgatcccgcgtgagcagatgctggagtggcaggacgcggcggtggcacaggtgttgcggttcgagccgcggcgggtgctggagatcggtgtgggttccggtctgcttctggcgaagatcgtcgacgaggtcgaggagtactggggcaccgacatctcggccacggtggtggaccgggtccgggcgcaggccgcagaggccggatacggtgacagggtccgggtgagcgcccaaccggccgacgacatgtccgggctgcctcgcggccggttcgacaccgtggtgctcaactcggtggtgcagtacttcccgagcgtcgagtacctggaccaggtgctgcgccaggtgatggaactcctcgtggcgggcggccgcgtcatcgtcggtgacgtccgcaacgccgcgacacgcaccctcatgcagacggcggtgcagcgtacggcacacccgcacgcctcgcacgacgagttgcggacgctggtgaagagggagctgctcgccgagcgggaactggccatcgccccggagtggttcaccgagtgggcgggagacgactccgtcgcggtcgacatccggctgaagcccgggcaggcgcacaacgagctgacccggcaccgctatgaggtcgtcctgtacaagcgaccggctgacgtactcgacctggccggtgtgccgtcggtgccgtggggccgggaagtgcacgaccttgccgatctcggccgttgtgcggaccgggcgggcggtccggtgcgggtgaccgggatacccaacgcgcgtctggccgaggaggccgcactgacggtcgcgacgggtctcctcgacccggcgccccgctccggtgaaccggtcgatccgcaggaactgctccagtgggcacgcaaggacgatcgggacgtggttctcacctggtcgggggaggacacgcggtgcttcgacgcggtgctgctgcccgagcggcggaccgggcagccacatgtctcgggctcgttcgttccgagcggtgcgggcgggcgggtccgggcgaacaaccccgcgctggccaggtcgatcggtccgttgctcatcgagctgcccgagtacctgcgtgagcgtctgccggactacatggtccctcccgcgctcgtgccgctttcggagctgccgctgactccgaacgggaaactgaaccaccgggcgctgcccgcgccggactacgggcaggcagcgaccggtcgggcaccgcgcaatcaggtcgaggagaccctcagcgcgctgttcgccgaagtgctcggcgtggacaacgtcggcatcgacaacgacttcttcgccaccggcggggacagcattcgctccatccagatcgtcgcgcgggccagggcgcgtggcatcgaggtgagcacgcgggagatcttcgagcaccgtacggtcgcccggctcgcggacctggtcgaaggacgcgaggaagaacgcctcaccctggccgagctaccgggtggcggcgtgggatgggctccgctgatgccgacggcgaagcacgtgctcgcgctcggtggcggccttggccggctctgcatgtccatgatgttgaccctgcccgaaggcatcgaccgcgccggactggtggcgacggtgcagaccgttctcgaccggcacgacgtgctgcgttcccgactcgaccggacgcggcagggcctgtcgatcgagccggccggcagcgtggacgccggcgcgctgctgcgggaagtgcgctacggcgacgccgacgcgcacgccgagctggacgcggccgcggaccggctggacccggacgcgggcgtcatggcgcagttcgtgtggttcacctcggacacggacacggacgcggaccggttgctgatcgtgctgcaccacctggtcgtcgacggggtgtcgtggcggctcctcctgcccgacctggtctcggcctggaagcaggtccgggacggccgcaccccggaaccggcagggccgggcacctcgttgcgccggtgggcgcatgccctggccgacgaggcggcccgtcccgagcgggtggcggagctgcccgtgtggcggcagatcctgcgtggggacgagccggtactcggagcacgggagctggacccggcgcgcgatgtcgccgccaccgtggaaacggtgcgcgtccacgtgccggcggatgtcaccgagaccgtgctgaccaaggtgcccgcggtcttccggggcggtgtcgacgacgggctgctggcggcgctggcactggcgctgacccgctggcgtcggactcggggcgttcccgcttcgtcggctctggtccggctggaagggcacggccgggaagaggaggcggtgcccggcgcggatctgtcgcgcacgatcggttggttcaccacgatgtatccggtgcgccttgacctggccggcgtcgacgtggcggacgccttcgccggcggtccggccgccggccgggcgatcaagacggtcaaggagcagttgcgggcggttccgggcgacggtatcggcttcggcctgctgcgccacctcaacccggagaccgccgccgcgctgtccgcggaccgggaaccgcagatcgggttcaactacctcggccggacgtccggcacggatgtccccgaggagctgcgtggccagggctgggcaccggacaccacacagcgggacctgatcgccgcgccggacgcggacatgccggtgatgtcggcgctggagatcaacgcggtggccacgaacaccggcgccggtgacgagctgaccgcctacttcggcttcccgaccggtctgctctcccacgaggaggtgaccgagctggccgacctctgggtccaggcactgaccgccctggcccggcacgccgcgacacccgacgccggcggaatgaccccgacggacgcgcccctggtcgacgtgagccagcgggagatcgacacctgggaggctcggttcggccacctggccgaggtgtggccggtgacctcggcgcagtccgggatcctcttccattcgatgctggccggatcctcgttcgacgcctaccacgtgcaactggtgttccacatctccggtgacgtcgaccccgagcggatgagccgggccgggcagatgctgctcgagcgccacaccagcctccgtgcggcgttcgtcgacggggccgacggcgatctcgtgcaggtggtgccggcggcgggggtgaccctgccgtggcggtacctcgacctgaccgggtacggcgaggcggagcggaccgagacgttcgagcgcttcctcgcccaggaccaggccgcccacttcgacgtgggcaccccaccgctgatccggctggcactcgtcgccctcgagcccggccgggccgaactcgtgatgaccgtccatcactcgctggccgacggctggtcctcgcccttgctgctgcaggacctgctgctgctctacgcatcccacggcgacgcggccggtctgcccggcacgcggagctacggtgagttcctggcctggcgcgcacggcaggaccaggacgaggcggcacgggcgtgggcggccgagctcgacggggtcgatgaaccgaccctgctcgctccgggagccacgggcggcgacggactcgaccaggtcgaggtcgccctcccgctggacctgtccggcgaactcaaccggtgtgcctccgtgttgggcgtcaccatcaacaccttggtccagggcgcctgggcgctgctgctcggtcagctcaccggccgccaggacctggtgttcggcgccaccgtctccggtcgtccgcccgccgtgacggacgtcgagacgatggtcgggatgttcatcaacaccctgcccgtacgcgtggagtacgcgcccggcgacaccctcgccgaggtcctcacccggctgcagagccggcaggccggcctggtggagcaccactactacgggctcacggagatccagcagtccgtcggcctgcagaacctcttcgacacgctggtcgtcttcgagtcgtacccggtcgaccgggacggcctcagctccgccaccgacgccgcggacgggatcgccatcaccggtctgcgcccgtccaacggcacccactacccactggctctgatggcggcggtcgacacgcacctccagttcctcctccagtacacgcccggtgtcttcgaccgggacacggtggaggcgtacgcggcccgattcgtgcgcatcctggaacagctggcggccacccccgaactgaagaccgcgcagctcgatgtcctggagccggccgaacgcgaccgactcctcgtcgagttcaacgacacggccgtcccgactccggacgtctcggtcaacgcgctcgtcgaggcacaggcggcgcggaccccggacgaggtcgccgtggtcgccgagggcgagtcgctcacgtaccgcgaggtgaatgcccgggccgaccgcctggcgtgcgaactggccgcccgcggggtgggcccggagtcgatggtcgcggtgtcgctgccgcggtcggcggacctggtggtcgccctgctcgcggttttgaaggcgggcggcacgcatctgccggtcgatcccaggtaccccagccaccgcctcgcggccatcttcgaggaggcgcggccgcacctcgtgctgacggaccaggcgacggtcggcgtgctgccggagcacgacgccccggatgtcctcctcggctcactcgacctgtccggagacgtcaccggtctcgaaatcccgtcccacgcggatcagttggcgtacgtgatgtacacctccggctccacgggcaagcccaagggcgtcgccatcacccacggatgcgtggtcaacgccgtgctgcggctcgcccccatcgtcggcatggagccgggcaagcggctcctcgcggccgcgtcggtcaacttcgacatctcggtgttcgagatcttcacgaccctcgccaccggcggcgtggtcgacgtggtccaggacgtgctggtcctgggcgaccggaagggctggagcggcagcgtcatccacaccgtgccgtccgccttcgccgaactcgtcgacgacatcgccgaccgcaccagcgtggaaacgctcgtcttcgccggcgaggccctgccctcgtcgctcgtcgagaagacgcgggatgccttcccgggcgtacggatcgtcaacgcctacgggcagaccgagtcgttctacgccaccaccttcaccgtcgacggtgagaggccggtctcggcgggcagcgcgcccgccggcgccccgctgggcaacaatcgggcctacgtcctcggccccggcctgactccggtgccgccgggcgcggtcggcgagatatacatcggcgggaacgtggcccgcggctaccacggccgcgccgcgctgaccgccgagcgcttcgtccccgacccgttcggcccgaccggtgcgcgcatgtaccgcaccggtgacctgggccgtttcaatggcgagggccagctggagtacgtgggccgcggggacgcgcaggtcaaggtgcgcggcttccgcgtcgagcccgccgaggtcgaggccgcgctcagcgcgcaccccggcgtcgcgcagaccgccgtcatcgcccgcgacggccgcagcaccggcaagcaactggtcgcgtatgtcgtgcccgccgtcaccggcgacagtacgacgaccggtgaccctcgtggcccggagacgaaggagctgcacgacttcgtcgcggagcggctgccggacttcatggtgccgtccgccttcgtggtcctcgaccggctgccgctcgcgacgaacggcaagctggaccgggccgcgctgcccgagccggagtacaccggcgccgcctaccgggcgccccgcaccgcccgtgaggagtccctggccgcgctgttcgccgaggtgctcggcgtggaccgggtcggcatcgacgacggtttcttcgagctcggcgggcactccctgctcgccacccggctgatcagccgggcccgcgccgagatggggatagagatacccatccgcaagatcttcgacctgccgacggtggccgcgctcgccgcgtggtcggaggaatcggctgctccccgtcgccccggcctgcgcaagatgttcgtagaggagtagaagcaatgattccgctgtcattcgcacaacgccgtatgtggattctgcaccagatggagggcgggtcggagaactggaacatgccggcggccttccggctgaccggtgccctggaccaggccgccctcaccgcggcgatccgcgacgtggtcgaccggcacgagaccctgcgcaccgtctacgagacgaacgacgacggtgagctgtaccagcggatcctcccgacagcggaggccacgcctgaggtgccggtcatcgaggtggcgcccggggacgtgtccggcacgatcgaggaggccttcgggtaccggttcgacctggcggccgaacccccgctgcaggtacgcctgttccgctgctcaccccaggagcacgtcctggtcctggtcatccaccacatcgccacggacggcagctcggtcgcgcccctggtgcgggacctggccgcggcctacaccgcccgccgggacggccgggcgccggcgtgggagccgttgcccgtgcagtacaaggactacacgatgtggcagcgtgagctgctcggcgacgtggcggacccggacagtctcgccgcggcgcaggtcgcgtactggcgcaaggaactggccggggtgccgcagccgctgaacctgccgctggaccgcccgcggcccgtccaggcgagcgggcgcggctccacggtcggcctcatggtggagccggaggtggcgagcgggctgcagaagctggccgacgagcgcggggcgaccatgtcgatggtcctgcacgccgcactggcggtgctgctgcgcaagctcggcggcggggacgacgtgacgatcggcagctcgatcgccgggcggaccgaggaggcgctggccgatctggtcgggttcttcgtcaacacccaggtgctgcgggtggacctctgcggtgacccgtcgttcaccgatcttctcgcccaggtgcgacacaagtcgctggcggcctacgagcaccaggacgtgccgttcgacatgctggtcgaggcgatcaaccccgaacgctccgcggcctaccagccgctgttccaggtgatgctcggcctgcagaactacgagaggccggaactcgaactcgccggactcacgttggaggtcgagcagaccatcccctcgacctccaaggtcgacctgttcttcaacatgatcgtggacgactcgggggcgctgcggggcgacatctcctacgcgacggacgtgttcgaccgggagacggtcgaagccttcggggctcggttcgtgcgtgtcctggagcaactggtcggcgatccgggtatgtgcgtcggggatgtcgacgtgctgagcccgggggagcggcagcggctggtggtggaggtgaacgacaccgccgagccgaccctggagctggtggaggcggtgcgcaggcaggtgagggcgacaccggaggctctcgccgtcatcggcgaggaggagtcactcacctaccaggagctggaagcgcggtcgaacaggctggcgcactggctggccgacctcggtgtgcgggcggagtcgcgggtcgccgtgtgcctgccccggaccgtgaacctggtggtggcgctgcttgcggtgatcaaggccggtggagcctacgttccgatcgatccggaacacccgcgttcccggatcgactacatcctcgagcacgcggatccgctgctggtgctcgacgccgaggcgctggccggtgtggattggccggcgtatccggatgcggcaccggaggtggtcgtccggccggagaacgcccagtacgtgatctacacgtcggggtcgacgggcaagccgaagggcgtggcgatcccgcgcggcgcggtggcgaactacctggccacgacacagcggcggttcccgctgtcgtccgcggaccggatgctgttcagcacgacggtggccttcgacatggcgaacaccgagctgtacctcccgttcaccgccggcgcgaccatggtgatggcgggcaaggacaccgtcaccgacccgtcggccgtgctggagttgatacgccgccacggggtcaccgcggtgcaggccacgcccgccttctggcagatgctgttgatgcacgacccgaacgccgcgaagggtctgcggatcatcatcggcgcggaggccgtgccggtacgcctggccgagaccttggcgaagcaggccgccgaagtgttcaacatgtacggcccgaccgagacggtgacgtggtgcaccgaggcgcgcgtggaggtggggcagggtgcgccgatcgggaggccggtcgggaacacccaggtgtacgtgctcgactcgcggctgagcccggtttcgcgcggggtaccgggcgaactgtacatcgccggtgccgggatggcccgcgggtaccagggtcggccggagctgaccgcggagcggttcgtggcgtgcccgttcggtccggccggcgcgcggatgtaccgcaccggggacctcgtgcgctgggacgggaacggtcagctggagtacctcgagcgcacggacttccaggtgaagatccggggtttccggatcgagctcggggagatcgagcacgtgctgaccgggcatcccggcgtggcccaggcggcggccgtggtgcgggagaaccaggacggagacaagcgcatcgtgggttacgtgatacctgagcccgatgcctcgcaggccgacggcggtgtccaggcgctgctcgccgagctgcccgcctacctgcgggggcgtctgccggactacatgatgccctccacgctgatcccgctctcggaggtcccgctgaccccgaacgggaagctcgaccgcggagcactgccgtccgaggacatcaacgccgcggtcagtcgagagccgcgcaactcccacgaagagaggatgtgcgccctcttcggcgagctgctcggcatcgagcgggtcggtatcgacgacgacttcttcgagctgggcgggcactcgctcctggccacccggctcagcgctcgcatccgcggcgagttcgacatcgagatgcccctcaggacgatcatcaagtaccccacggcgggcgagttggccgcgctgttgctcgtcaccactcccgcggagtcctccgacccgctcgcggtcgtgctgccgttgaacagcgatcccggtacgggcaagccgccgctgtggttcttccacggaggaggcggcctcggctggacgtacttcagcttcgcgtcgtacgtgccggactggcccgcctatgccctgcaggcccgtggctccgacggcgtggacaagctggcggggtcggtgaaggagatggtcgaggactacgtcaccgagatgctgaagatccagccggaagggcccttccacctgatcggctggtcctacggcggcacggtcgtgcaggccgtcgcggaggcgctcgaccggcgtgggcacgagatcgccttcgtggccatcctggactcccagccgggtgggcacgggttcacggagatccatgccggcaaggccctgccggactaccggtccgaactcgaggaattcttcggccagtacatcggtaccgacaaccggcaagacttcctggacgccatggcgaaggtcctggccaacaaccacaccctcatgatggatttcgaatcgccggtctaccggggcgatgtgctgttcttcagcgcgacccttcaggaacgttcgtacgcgcatctgtggcggccctacgtcctcggttccatcgaggtgcacgacgtgcgtgccacgcaccacgaaatgaacatgcccgcggccgtggccgaggtcatggaggtcatcaagcgcaagctggcggagctgacggaatgaccggacagcgatctcccggaatcggttcaaagaaccatcgaatggatgattggggttggtcgtggtgaaggaacccgggatgtccgcggaaaacggcgatcaggtcacgctgttgtgcgtgccgttcgccggagcagggccttcgttcttctacccgtggcgggagttggccggcgaccggtggcgcgtggtctcggtcgagcttcccggcagggagaagcggctcctggagacgccgtaccggaatgtcgtcgaagcggcgaagaactcggtcgacgacattgtcgcggaactcggcgcgggggcgcggaccgtgctgttcgggcacagcctgggcgcggtgctcgcgtacgagctggtgcacctgctgagcacgcgtaacgtgcccgtcgagcggctggtcgtcagtggttcgccggggccgtggacacagcgagagaggcgggcgacgggactcccggacgaggagttcctcgcccgggtcgaggagttcgcggggttccggcacgaggccctggatcaccccgagatgcgtgaactgattctccccgtgctgcaggccgactgcgagatgcacgagaactacgttccgagcaccgacgaaccggtgtcggtgccgatctgttcgctgcggggcgactccgacggcctggtcaccgcggaagaggcgcggcagtggcgggacgcgactacgtcgagtgaattcagttatgtggagttcccgggcgatcacatgtacctggtcgatcgcggccgggaggtgctggacgtgatagaggcggaatccgcccgcagtcgctagaaatcctcgaagacgcgcatcaggtcttggcgtgatgcgagaccggggcccgaggccgcccaaggcccgcactctagtggtgcgggcctccgccggcggcccgaaaaacagtctcgaccagctcaccgcgctggtgaagacgcggctgaagcggatgcggtaccgcccctgcctccacgcccgggcaggcaggaattcccatcggacgcgccgccggctcggcccgacaggatgagccagtcacgtacgctggctgggaattcgtgtcctgtcggcgggacatgaatgcatgcgcaaggtccgcatgtgcctgcccgtcattcgggaccggtagatgaagcgcgaatacaaactccgtcacgcgccctcgcgaaagatcgcaggtagcgccccgcgaagacacctcgaacgcgtagagaaacggagtcgcgcaccggaaatccttggttgaacggtgtcggacgcggtggcatgctcctcaatgcgcctgaaggccagtcgatttcctgaacggaaggcaatcgtgatcacgcacatcgctcttttcaagctcaaggacggcatcgagcgctcctctccgtccgtggtcgaagccgagaagttcgccagggcagtcggcagccatgttccggaactcgtcgactggcgggtgggttggaatatggtcgaccgggacatttcctatgacttcgccgtgatcggggtgctgccagatctcgccgcgctggagaaatatcaggcgaacgcgttccaccaggagtccgtgcagaagtggcgagagatatccgactgggtcgtcgccgacctggaagacagctgaaggaggactgggtgttcacgcaatacgacccggaatccgcggcgctcacggacgagctgcgcggattgttcgacgagttcggcaagggaaagtggacggctgacgagctggaaacccatcagaccgccaagctgcgcacggtacttgcctatgtccgcgccaactcgccgttctaccgcgccaagctgaacgggatttcggacgagacgctcgccggactgcacgtcagcgatatccggaaccttcccttcaccaccaaggcggatctgcagcaggcgcagttcgacatgctctcgctgcccgtgtccgacgcctggaccttctacgagaccaccggcaccaccggaaagcccaccccgtgcccccgcaccaatggggacaccattcacaacaacaccgtgctcaccgcctattaccaggacatcttcgcgcagcacggcaaccggcaggtcatcggcatttccggccccacggaactgcacgccaccggggacacgttcggggacgtgtgccgcaacctggggcacgcggtggccaagatgtggccgcactcgccggtgatcggattcgaccgcgccctggaggtcctgcggctgctgccggtgaccgggctgttctgcaccccgggcatggccctgcggctggcccagaaagcggtcgaggcggggctggacccccggcgggacttctccctcgacctgctcatgctcaccggcgagctgatgtcgcccagcctccgggacaacatcggcgcgctctggggggccgaggctcacaactgcctctacgcgtcacaggaggcctccgtcctcgcggcggccacctccgacggcacgctgcgcatcgctccgctgatcaaccactacgaggtgatcgaccccggtaccggcgagcccgtggcgcccgaccccgacggggtgcgctacggcgaactcgtcgtcacgaacctctacaccggcgccaagcccctcatccgctaccgcaccggggacctggtgcggatgacggaggccgggcccggcgccgccgtaccggcgccggcgctggagcccgtcggacgtgtccgcgaccggctcgggctcaacgggcacctcgtcaacggctacgacctggagaacctgctgctccgtcgcttccgcggctacctcgactaccagatcaccgtgacccgtgacgacgcgggcacggacctgctttccctgacgctcaacgccgacccggaccggcactggggagacgacatcgaacgggccgtcgcggactgccgagaggaactggacaccgcgctgagcgtggccttcggtgaccccggccccatcaccagcaccggagccatggtgagctggaaggccgcgcgcgtggtggacctccgcgacccgggcgccgggacctcggtcgagtcccgctcggccgagcggatcgccggggcgagggcatgacggccggcccgtcccccgccgacccgccccccgtcggcgcctcccctccgcggcgacggtcgcagctcggcctcggggcatgggcgtacgaccgcggcgagttcgtttcggcgcaggctccgcggctgccgctctccacacagggcctgcactacgggaccgcggtgttcgagggaatccgtgcctaccgctcgcacgacgggctccacctgttccgggcgcacgaacactacgcgcgcatgctgcgcgcatgccggatgctgcgcatcacgggcatcccagcgacggtcggggaactcgtcgacatcactgtcgagttgctgcggatgaacgcgcacgacggtgacgtctacgtgcgtccactggcgcacaagctctctctgctgcctggcaccccgcccggggtctcgctggccggcgtgtccgacgcgctgtccatcaccacgttcggctatccgacggccggtgacgtccaggaggtgcgctgcgccctcagcgcgtggcggcgcccgccccgcgacacgcttcccgcgcaggcgaagatcgccggtggctatgtgaccagcgccctcgcctgcgacgaggcccgcgcggccggatacgacgacgccatcctcctggaccggtccggcaacgtcgccgaagcgaccaccgcgaacgtgttcgcggtcagggacggcgtcctcgtcaccccgccggacacgggcgacctgctgcccggcatcaccagggacaccgtgatcaccctgtgccgagaggccgggatgacggtcctggaacgccccctcagccccgcggacctctacaccgccgaggaggtgttcctcacctcgaccggcaaggaagtggcctccgtggtcgcgctgtccggccgggacatcggaagcggcaccgcaggaccggtcgcggcccgcgtcgccgcgctgtaccgcacggccgtgacggctcaggacgctcaggagccagccgggggcgagagccgtccggagtggctcactcccgttctgccgtctgagtacctcggcgcgcggccggcgcacgttccgccgacgcccccggagtttcccctcccaaccgaacacctacgccaagcaaagggacatgcggatgacgctgcatgacttcatctcactcctgcgccccggctccgaacagccctcggccgtcggcacgctcggcccgcccggcacgagcagcgaagtggcggcgaagcggtacgccgcccagatgtccgggctcgacgggccaaccatcgacgtccagctgttcgacacctacgagaaggcgggagaggcgctccaggcccgtgatgtgactcatgtcgtcgtggccaacgcctacaaggaaatcaacccgttctacatggacccggccgtcgagctggccggggtgttcgtgatggataccccgctgtacggaatcgccatggcccgcggaggcggaccggtgccggatgccccgaccgtcgcgagccacccctcgcccgagccgatcatcgcgcagctcctgccgcgtcgccacgcgacgtacaaggtgatccaccacgactccaccagcgccgccgcccgtgccgtcgtggagggaaccgccgatctcgcgctgaccaccgtgccggccgcgcagctgcacgacctggagttcatctcggggacccggcccatacgcatggtctggtcggtgttcggcagggcggtgcccacacgcaacaaggagacgagcccatgctcctcctgaacggagaccaggtacgagaggccctgccggtggccgaggcgcaccgggtggtggccgaggtgatgcgccgttacagcgcgggcgacgtcgtccagccggtgcgcaccgtgctcggatccggcctggacgcctcgctgttcgccgccatgccgtgccatgtcgccggcgagtcggacgcgggatacggcatgaaggcggtgctgcacgcgccaggcaacagcgcccgcggcctgccgacacacgtgggcatggtggtggtgttcgaccccgagaccgcgcagcccctggccctgatcaacggtgcggccgtgaccgcgctgcgcacggccgcggcctccgccgtggcgaccgaggccctggctgccccggacgccggcgacctggctctgatcggtgccggtacccaggcgcgcagccatctgctcgcgctgcgggacattcggccgctgcgccgggtgcggctgtggaaccggggccacgcgcgggccgaggagttcgtggcgtgggcgcgtgcggaggccgacgtcggcgtcgagctgacatccacgcccgcggacgcgctgcgcggcgccgacctggtgtgcacgacggtcgacacggccgaacccgtggtccgcgcagcggacttggcggacggcgtgcacgtcaacgccgtcggctcctccgtcccgggcaagcgcgagctcgactcgggcgcggtggcctcctgctcggtcttcgtggacagcagagagggagccctgcgcgagtcctccgagatcgcggcgcccgtggaggaggggctggtgcccgccgaccggccgctgcccgagatcggcgaggtgctgctgggcaagcaccccggccgtacgagccccgccgagcgcacgctctacaagtcgctgggcatggccgcgcaggacgtcgcctccggattcgccgtcgtccgtgccgcacggcgcctcggcatcggcaccgaagccgacttcacctgctgagaccccgcgtgagaggacacggtatgacggcactactgattggcaatgtcggagtcatcggcgacgagcggcgcatggcggagtaccgcgcgaaggtgctggacacgctgcggctctacggcggagggttcgtgatccggggtggggagtccgaggcactggaaggcgactggcagcccgagcacctgtcggtgatggggttccccacggccgagcacgcccgccgctggtacgactcgcccgaataccgcgccattgtcccgctccgtgacggcacgcacatggacctgatcctggtcgagggtgagggcgaatgacgccgccgtcccgccgtcggcgttccttctcgcaggtggacgtgttcaccgaggtcccctacctcggcaatcccgtcgccgtcgtcctggacggcgacgggatctgcgaccgggacatggcccggatcgcggagtggaccaacctgtccgagacgacgttcgtcgtcccgcccacctccgacgaggccgactacgggctgcggatcttcacgccgggcggtgagatcccgttcgccggtcaccccactctgggctccgcacacgcctggctggaggccggaggcactccgaagaagcccggagagctgacgcaggagtgcggcctcgggctcgtgaaggtgcgactctccggcgacgggctgggcttccgcgcccccgccctgcgccgcagcggtcccctggacgacgcgcacctggatcgcatcgcccgcgggctgcggatcgaccgcgcgcggatcgtcggccaccagtgggtcgacaacgggcccggctgggccgccgtacagctcgcctcggccgatgaggtgctggccctggagccggacgagcggcacatgcgcgagctgatagtgggtgtggtcggtgcccaccccgagggctcacccgtgcagttcgaggtccgcgccttcgcgctgcccaagggcgtgcgcgaagaccccgtcaccggaagcctcaccgcggggctcgcccagtggctcatcggcaacgggacggccccgcgcggcttccgggtcggccagggcgcacgcctgggacggcagggcgtgctcaccgtggaggcgcagggccaggacatatgggtcggcggcgcgagcgtgacctgcgtgcggggcgcccttcaggcgtgagaccggcggcttcttcctgtccgtggggtgtccgctgtcccgccgacgggacagcggcactcgcgcgactccgcaccaccgcgaacgaacggtccgcctgtttcgggatgccgtttcggggagttcacgctgttgaccgagagggtgacccgaccaggcagacgatggcagactggcggcgcatcgaggcgccattgttcagggcgatttctcatgagaaccatgactttgaatcacccctgccttggtaagtgcgtggacgcgatggttgtcacttgtcggattccgtgacgagaatagatgattgattctggcggcgacttgaccgccatatgcgaatatgccctgggggcagcgatggtaaaggaattaagcgcgccgacgccgggccggcggatttactcgctctggggtggcgacgccgatgcacggtgcctgctcgaatcgttggccgagaccgcacgcacgcgaagagaagatatcgcggtacaggacgagacacatgaactgacctatgggcggctcatgacgtgggcgagtaatatcgccgaccttctcgccggccacggtattcgtccgggcgaccgggtggcggtcacggggcctcgcggtgccgcagtcgtagcggcgatgctggccacggtgagcgcgggagcgacctatgtgcccctcgacgtcgagtatccggtcagacgcctcgagcacatggccgccgacagcgaggcccggctgcttctgttcagcggcgacgaaccggctttcgacctcagggcccaggcggtccgcatccccgacgcgccggacctgagcgaccaggaggccattgcggcgctgtcgcggctgtcctgccggccggacctccccgtgtacgtcatctacacctcgggctcgaccgggctgcccaagggcgtcgccctgccccatcgctgtgtcgacaacatggcggcctggcagtggcaacactcggtgcgcccggacctgcgcacggcccagttcgcaccgctcaacttcgacgtgtggttccaggaagtactcggaacgctgtgcggcggaggaacgctggtcgtcatgcccgagttcctccggcgcgaccccatcgccctcctggactggctcgccgaccaccgcatcgagcgcctgttcctcccgtacgtcgccctgcacatgctcgccgtggccgcggaggccgcggactcgctggagcacctcgccctggcggaggtgaacaccgcgggcgagcagctcgtgtgtacccccgcggtccgggagctcttccgccgcctgcccggctgtcggttgaacaaccactacggacagagcgagtccgccatggtgacggtgcacacgctcacgggctccagcgacgactggcccgcgctccccccgatcggacgtccgctgtcgggctgcgagatcctggtcgacccgaccgagccgggtgaaccgtcggtgggcgaactgctggttgccggcgcaccgctgtccgtgggctatctgcaccagcccgagctcaatgccgagcggtacgtcaccctcgaccggacgacgccgcaggggcaccgccgcgcgttccgcaccggggacctggtgcgcgtcgagggggacacggtgcacctcctcagccgtatcgacaacgaggtgaagatccgcggggtccgggtgaacccccttgaggtggacgcctgcctgctggagcagccggggatcgtcgaggcggtcaccgtggtggtggacatcgcccagggatcccggcagctgcgcgccgccgtgacgtcggacgtcggtgtgggcgagttcgacgccgcgagggtgctcaaagcgctcaccgagctgcttcccgagcagttcataccggtctcgatcaccgtactgccggaactgccgcacacccccagcgggaaggccgaccgggctgccgtcgccgccgcgctcgcgccgtcgtcgccatgacgccggacgagtggactaccgaggggatccagacctcgctgagaagcccaccccgctgatccttggcgacccggcgcgccgcccggcggcgcacacctcagcgtgccggcgacctgaagggacgtgtgcgcggcgaggagacccgcgacgtagtccgggaattcccggagaagctggataaacggaatcgatccgaacaggggtggcgcatgcaagacaacgacttcggcacaccgaccgagcggcggctcgcggacatctgggccgacatcctgcggctggacaacgtcaagcgtgaccaggacttcttcgacgccggcggagactcgttgctggctacgaaggtcgtcctacgggtgtgccgggaatgggacatcaaattcacggtcagggtcctgaacgacgcgccggtcctggccgacctggctgaacgcatcgaccagcgggtgacgaagtcgggacagccgtccgcgggcgcaccctcgccggcagcccgcgcgagccgggccggagcatgtttgtgggagatgcggccggggacggcgggcgccggacaggacacgttgctcctcctgccccatgcgggagggtcggcacagaactacgcctcgtgggcggacttcttccccaaggacctgcgcatcctcgcggcccagtatcccggtcgggcggcgcgcgccgacgagccggccgcggccgacctccatcacatcgttgacgagatcctcgatgcgctgggcgatgtcgaagggcggctctacgtcttcggccacagcatgggctcctacgtcgggtacgaactctgctggagacagcagttggcgagccgcccgcccgtggccctcttcgcctccggggccgttcctccgcacaggcaccggccgaacccggcgaccgaggaggagatcacggacgagtggctcatgaaactcctggacatgtacaacggcgttcctgacgacctcatgaattacccggaggtcataagccaggcgctgggcacgctgagatccgacgtagtgctcttccgcaactattcgtacggcgatcggcggcgtcggttggagatcccgatcgtggcgttcggcggagaacgcgacgaccttgtgcccgccgccgaggtggaacgctggcatgaactgggcgcagcggaatgtgccacgcacatcatcccgggcgggcatttctattacctcgacaatacggcgacggtcacggccgccatgtccaagtatctcgtgagcgttcatgacgggcagaaggaataggagatcgcgagcatgtccagccaagaattctccgggatcacggatgccgggacggtcatgtcggatcgccggaagatcgtgctggtggaacttcccacctacgagaacatcctgccgctcgcctcgggctacatccaggcgtacgcgcaggccgacgaggccgtcgcggcggaccacacgttcgagatcgtgtccctcccggtgtccgccgaccggcgtcagatggtccgggagctcgctgacagggacgcgtacctctatacgttcagctgctacatctggaacatgaagctggtccgctggctgctgaaggaactgcgcgcactgcgtcccgacgctcactacctgctgggcgggccacaggtgatgaaccacgccgcgacgtatctcagcgacggtgcggagaacgtctacgtgtgcaacggcgaaggggagcgaacgtccctagagttcatccggcagctcggttcgcagacgccggacatgagccaggtaccagggctcagcttctggtcctcgggcgaactcatcaccaccgaatcggcgcccaggatccagaatctgatggacattccgtcgccgttcctgaacggcgtcttcgaaggtcacgaattcagcttcgccatcatggagacgaaccgcggatgcccgttccgctgcaccttctgctactggggcgcggccacgaactccaaggtcaacaagtacgaagaggatcggatcaaggatgagctgaagtggatcagcgagcacgggtactccgcgctcatgatcgccgacgcgaactggggcctgtcgccccgcgacgtcaccctgagcgagtacatcgtcgagtgcagcgaggagaccggctacccgctgatcgttcacatggccgccgccaagaaccggcccgagcgcatggcggagatcaccgagatcttcgtgcgcggtggactgatggtgagccagcccatctcgctgcagacgatgaacgagtcggcgctggagatggtggaccggaagaacatccgcgaggacacctacatcgggctgcagcgcctgctccgggagaagcggatcagctcgtacgtggaaatgatctggccgctgcccggcgagaccctcgagtcgttcaaggacgggctgaccaggctgtgccgctcgtacgccgacaccatcatcgtctacccgcagttgttcctgcacaacacacccatgtacgcacagcgggaaaccctcggcatcatgaccgcggaggcggccagcgacgtgtccgaggcggaggtcgtgctcggcacgaaatgggtgaccgaggaagactgctacgagggctactgggtgaaccacgcgctgtacacgctgtacaacatgcgcgccctgttcgtactctcgggatatctcgacgcgaccgggatcatctcctacggtgacctgttcgccgagatgtcccgctacttccgcagcagaaccgactcggaggtgtgccagttcttcattcagtcgacgaaggacctggccaactacgacctgctgaacaccggtaagaccgcgcacctgatcctcagctcgcatcgcgaggagttcgaccggttgctggccgacttcgtcgccgcccaggactggtgggccgacccgatggcacgccaggcgttcgaaatggacctcctcacacgggcctacatctaccgtgaaccggtgcgtacgccggaccacgagttcaccgagatcgtcctgcgcggccagccggattcacggggcttcctggtcgaggtgtccgcggagctgttccgcctgctggtggcacgggagatgctcgaggccgtcgacgaggagtcggagcggatcaccctgcacatcgaccaccgcggcaggcagaagatgccgtaccagccgcagcggagcctggagcacaacgcgaactactgccagggcatggtgctgcggtcccgggagatcctgcccaccattcaggtcgcctcgacagaggttcccgcctccgtcgcgtgagctacggcgccggggcgaggccggataccccctgcggggcggtgacaccggccgtcgtcccggtgccttcttcagcgcaacacctcaggaccagtcgtacacgcacctgtggcggccgtacatcctcggtgcgatcgaaatgcgcgatgcgtgccacgcaccgcgaatggaccatgcccgcacccgtggcggaatagccggacctcgatcagcgggcaccccacaccgcgcgagagaggagaaaaagcaatgattccgctgtcattcgcacaacgccgtatgtggattctgcaccagatggagggaggggcggagacctggaacatgccggcggccttccggctgaccggatccctggaccaggccgccctcaccgcggcgatccgtgacgtggtcgaccggcacgagatcctgcgcaccgtctacgtgacgaacgacgacggtgagctgtaccagcggatcctcccgacagcggaggccacgcctgaggtgccggtcatcgaggtggcccccgaggacgtgtccggcgccgtcgaggaggccatgacgtacaggttcgacctggcggttatgtcctcggttccatcgtggtgcgtgacgtgcacgcccggcaccacgaaatgagcatgcccgaacccgtggccgaggtcatggaggtcatcaaccgcatgctggcggagccggcggaatgaccggacagtgatctccggggccgtggacacagcgcgagagacgggcgacgggactcccggacaaggagttcctcgcccggatcgagctcggtcctcgacgtgatcgaggctgtcgtccgtgcaccgcttgcaccgctctgaccaagggcgatgcgcgggaacacccgtgtcagcggtcgtgtcaggagtcatgacagagcggtgacagacgggtgacagacctggccgcgactgtggaggcatgagaagtacagcgattgcagtttcagggctgcggaaggcatacggagacaagaccgtgctcgacggcatcgatttcgatgtcgccgaagggtcgatcttctccctgctcggcccgaacggggcgggcaagacgacgacggtgaacgtcctggcgacgttgctgaaggccgacgccgggacggtgcacgtcgccgggcacgacgtggcgaccgcgaccaagcaggtgcgcgccgccatcggcgtgaccggtcagttcgccgcagtggacgagctgctctcgggccgggagaacctccagatgatggcggacctgaagcgcgtgcgctccggcgaggtcgtcacgcggctgctggagcggttcgacctggtggagtcggcggacaagatggcgtcgacctactccggcggtatgcgccggaagctggacctggcgatgacgctggtcggcaacccgcggatcatcttcctggacgagccgacgacgggtctcgacccgcgcagcaggcgcacgatgtgggggatcgtccgcgagttggtggccgacggcaccaccatcttcctcaccacccagtacctggacgaggccgacgagctcgccgaccagatcgcggtgctgagcgatggcaagctcgtcgccgaggggagcgccgaggagctgaagcggctcatccccggcgggcacgtgcggctgcgcttcaccgaccaggccgcgtaccggtcggccgcctccgcgctgcgcgacgtcaccacggacgacgacacgctgtcggtgcagatcccgagcgacggcacccagcgcgagctgcgctccatcctcgactggctggactcggtcggtatcgaggcggacgagctgaccgtgcacactcccgacctcgacgacgtcttcctcaccttgaccgagcgcacgagcaaggaggcgatctcgcagtgagcgctgtctcgacggcactggccgactcggcgatcatgctgcgtcgcaacctgaagcacaccatgcggaaccccgtcacggtgttcaacgcgatcctgttcccgatcgtgatcatgctcatgttcgtcaaggtgttcggcggcgccttcagcgtcggtcagcactacatcgactacgcgacgccgggcatgctcgtgatggccgtcagctacggcctcggggccaccgcgacgtccgtgaactccgacatgaccaagggcatcatcaaccggttcaagaccatggacgtctcccgcggagccatgctgaccggacacgtcgtcgtcaccacggtgcgctgcctggtggccgccgcggccatcatcggggtggccttcgcgatgggattcgacccccacgcgagcgccctcgactggctcggcgtgctcggtctcttcctgctcctcgccgtcggggccagctggctcaccgtcgccatgggcctgggcgcgaagagcgcggagtcggcgggcctggccgccgtgccgctgatcatgctgccgttcctgagcagcgcgttcgtgcccgcggacacgatgggggcaggggtgcggcagttcgcggagtaccagcccttcaccccgatcatcgagacactgcgcgggctgctgtcgggccaccacgcgtcgaccggccacacggtgtcggctcttgcctggtgcatcgggttggcgatcgtcgggtacctgtgggcggtctccacgttcaagaagcgagcgtgacctcgaccagctgagaccagctcgtgcgtgtcccctcccgtgccgcctcgacgaaccccgcgtcgccgaggcggcgccgcgctgtctgctcgatccgggccacgtccgtatgggagcggtccgccagcccgcgcacgctggtgctggccgcgagaagccgcgcggcctgctcgggctggtcgcggcgaagtgccaggtccgcgaccccgacgagcgcccgcgcgatcagcggcgcgtgtcccgcctcggacgccgccgcgcaggccgccgcgcggtacgctcgcgcctcgccgaggtcgtcggcgaggtagccgagcagatcgtgggtcaccgcgcggatgttcgcctgctccgcgtcgtcgcccagcagggccgtcgcggcgccgagttgcctgcgtgcctcctcggggcggccgccccaccgggcgagttccgccttcgacagggccagcacggccagtgcgcccggccaggcgacccgctccgcataccgctgtgcctcggcgatggcggccgcgctggcgtcctcgtcgccgagcagccagtacaactgcgcctgccgtgaccgcatctggatgatgtcctcgatggcaccgacctcggtgacgaccgcgatcgcctgctcgtagtgctcgcacgcggcggtgaactcgccgcgcgcggcgatccggtccgccagctcggtcagggcgaacgagattccgaaccgttcgccgatcgcccggaactcggcgagtgcccgctccaggtgcgcgtccacgtcccgcccgccctggccgagcatgatccgcatcttgcccagatgcagccgggccagcgcacgcgcccaggggtcctcgtcgtcgagcagcggttcgaacgcgggcaggaacgcgtcgggcccctgcagcatgcgtttcagcggggcgatgaaccccatcagcgggtggctgcgccggctgtgccgactgaaccggtacgccttgtcgatccactccgcgacctggtgttcgtcccccggcccggagctcaggaaatgcacgaccagcgcgtacatcacggcccggacctcgtcggccacctcgccgggcatcctgctggccgcggtgatcagttccaggccctcggacctgtgcccgccgagccaccagtaccagcccgcgcccgccgcgagccgcatcgccgcctgcgcctcgcccgccgcgagcgcgccgcgcatcgccgcaccgatgttgtcgtgctcggcctccagcgtggccagccacttcagttgctcggcgcggcgcagatgcggctccgcggtctcggcgagctcggtgaagcaggcgaggtgcgcgtggcgtgccagctccgcttcgcccgcctccgcgagccgctgcccggcgtactccttgatcgtgccgatcatgcggtagcgcggggcactgtcgccctcggcgcgcagcagcgacttctcggtcagcgaggtgagcagctcaagcacctgttcctgctcaaccgcggcgcccgcacagacccgttcggcagcgtccagactcgccccgccggagaacaccgagagccggcgcaggacgagccgctcggcgtcggtgagcagctcccaactccagtcgaccagcgcgcgcagcgtcttgtgccgcggcagcgcggtgcggcttccgctggtcagcaggcggaaccggtcgtcgagccggtgggcgagctggtcgatggacatggtgcgcaaccgggccgcggccagttctatcgccagcggcattccgtcgagagcccggcacacccgcgccatcgtggccagcgtgcgggcgtcggacgcgagatcccggcgcaccgctccggctcggtcccgcagcaaccgcacggcgggtgcggactcgatctcgtccgggctcgcgcccggctccggcagggccagcgggtcggcctgccacagcgcctccccggtgatgccgagcggttcgcggctcgtcgccaggatccgcagccgccggcactctccgagcacccggtgggcgaacaccgccgcggactcgaccacgtgctcgcagttgtccaggatcagcagcgcctcccgctcgcggatcgcggcgatgagccggtccgtcagctccacgttcggggccccgccgagcagggcgtcccgcaggccgagtccggcgagcgtcgcctgcgccacgtcggccacgtcgccgtccgcgccgatggcggccagctccaccagccaggccccgtccggcagatcgccgagcatcgcccgcgcggtctccgcagccagcctggtcttgcccgcgccgcccggcccgatcacggtggtgagccggtgctcggcgatgagttcgcggaccgcggcgacatcggcgcccttgcctatgaagctggtcagctcggcgcgcagattggtcttgcggttccgctcacgcgtccccagctcgccgcgcagcagcgcgacgtgcaacgcggacagctccggcgagggatcgacgcccagcgcgtcggccagggcctccttcgcacgctggtacacaaggagcgcctggctgtcgctaccggccgcgacaagggcgcgcatcagcgcggcgacgagccgttcccgcagcggatgcgcggccaccaggtcggtcagctccgtgaccagctccgcaccgcgcccgagggtgttctccgcgtcgaaccactcctccagggcggtcaggcgcaacccgtcgagccggacgaccgcggcgtcgaacgcggcgctgtcctgcgggccgctgtcctgcatggccgcaccgcgccacagctcgagggcctcgcgcagcagttgcgcccgccgggaggcgttctcggtgcgggcctggctcgcgacgacgaggcgctcgaaccgtacggcgtcgacggcgtcgggttccacgatcaaccggtagccatccgtatgcccctcgaccgctccgtacggcagtgccttccgcagccgggaaaccaagcgctgcagggcattcgtcgcgtcggcgggcgattgctccccccagatccagtcgacgagcgacgccttcgggaccacctgaccgggtctgagcgcgagggcgatcaacagtccgcgcagccgggcgcccggcacgtcgacccatacgccgtcgtccgtgcgcatctcgaatggacccagcatcgcgatctgcacccgccgattttgtcatgggcgcgtttggcgggcagccaactcgctgacgtgtgccgccgtgcacgcgcgcggcggccacgaccacggtgatgctcaggccgagcacaacggtggcgatgcctcttgaatcggataactcgccgtcaaacaccatgaaccgcttcgggcgcgcgtgatgcctgctcgcgtcggcggcgtcgcccggccgactgtgtcgacggacggcagccgaaaaggttttcacagtccagatcgaacggcgcagatcaaaacagaaatcaagactcggcgggcaggtatctgccttactgtcctgtcggcgggacagcaggtgcccggcaggatgtccgcactgtcatctcttgcactgggtttccctggccatttacgttggcgtcgcgatggcccctgggcgcaccaccgaaagcgggacacggctgctttccacctcaggaccgatgacacgcgacacgggccgacagcgctctcacccctgcccggtcggcgagcaccggacaccaccagcacggtgtgagttgaaaagaaccacgagacgctcgtccggccggtcaatggcgtgggcgggtattcccgttcggcggagaagcggagaaaggaaaggctggcaatgcagtcagaatcagaagccgcgcctgcgggtgcgtcggagtcgttcgtacaagaggtctcggcgctgtggggggaatacctcgactctcgtgaggtcggagcggacgacgacttctttgagctcggcggcaattcgctgatcggcatcaagatcatcgatcgggtggcccaggactacggcgtcgaactgtccgtgcgcgacttctacctggcgcagaccccggcccgggtcgccgagttgatcgagcggggaagggcgcggacgtgaggttgacgccgggtcccgcgcgcgacatcgacctcgaccgcgtcgacctgttcgacctggacctctacacctcgggtgacccgcatccgatctgggacgcgatgcgggcgaaggctcctttgcatcaccaagtccttccggacgggcgggagttctggtcggtgacccgctacgacgatgtctgccgggtgctcggcgaccaccgggagttcacgtcggagcgcggcacggtacccacccacctggggacggacgacgtcgcggccggcgtgctgctgacgtccaccgacccgccgcggcacaccgaggtccgcaggccgctcggcgccaagctcaccgcgcgggcggtgaagtcctgggaggactcgatccggcggtcgatcgtgcgcttcctcgaaccggcgctcgacggtggcaccttcgacctggccgagaaggcgttgctcctcccggcgatggtcacgggcccgctcctcgggatcccggagaaggactgggaggaactcgtccagctgaccgcgatggtgacggctccctcggaccagcacttccagcagggcagcgaagccgcgaccctggccatcgcccaccacgagctcgtctcctacgtcaaggagtgggtcaagacgcggcgggcggccggaggcgaggacgacagcctgctccaccacctcatgagcgtccgcccgggaggcgcgccgctgaccgacgaggagatcgccctcgacggctacagcattctgctgggcgccaacgtgacgacgccgcacaccgtctcgggtacggtgcaggccctcatcgagcggcccgagcagttcgagaaggcgcaggccgacccgtcgctgatcccgaacctggtcgaggaagggctgcgctggacgtcggccgcttgtaacttcatgcggtacgcggtggacgacgtccagatcggcgcaggcacgatcccggcccgtggggcggtcgtcgcgtggatcgggtcggcgaaccgggacgagtcccagttccccgatccgcatgtcttcgacatcacacgggacggcgcgaagcgccaggtcgccttcgggttcgggtcgcacttctgcatcggggcgccgctggcccggctgaccctgcgcgtcttcttcgaagaactgctccagcgattcggctcggtcgagctcgacggcgaaccgcagcacctgcggtcgtacttcatcgccgggatgacccacctgcccatcgtcgcccagaaacgaaagacgccatgacatccggctccaccaccgccacgtcgccgtggttcgtccggccgccgtccgccgagcaccccgcccggctcttctgcttcccgttctccgggtccggggcctcggccttcagcgcctggccggccgcgatcgacgacgtcgaggtctgcccggtgcagttccccggccgcgagaaccgccttgcccacccccactacggcacctacgagaacctcgccgccgacctggtcgaaatcctggtgccgcggctcgaccggccgttcgcgttcttcgggcactgcgcgggcgcgctgcccgcgttcgagaccgtggtccggctcgccgaactgggcctgccggggccgcagtgcctcttcgtgtcgggccagcccgcaccgcacgacgccgcgagcgaccggatgctcagcatgaccgagcccgagttgcgcgccgagttggagtcgttcctccgtggccgggggatcgaaccgcggccggacatgatcgatctgggcatggtcgtgctgctccgtgatctcgacgccgcgcgtgcttaccgtcggacggagccggtcgcggtgcggtgccccatcgtcgtgctgaactggcaggacgaccccgacgtgagccttgacgagctcgaggggtggcgtcggtactcggattcggtcgacatccgggtggtcgacggcggccactacgacttcatgaacgcgccggacgagctcctgaagcggttgacctcctggcggtgaaaggcggaagccggcctggaaggccgcagtgacaacgaccttcacgaattgatcgaccgcggatagccgtggctacacctgttcttcagagcaattgttgggggaggccctggtgggggacgtcgagaacttccggtcctacgcgcgacgcgccgtcggtgacgagcggacgccgcgcgagggggcgcacgagctggaggagtccgcgcgcgagcccatcgccgtcgtgggtatgtcgtgccgtctgcccaaggcccgcaatcccctcgccttctgggaactgctgcgcgacggcaggagcggcatcaccgacgtgccggccgaccgctgggacgcgcaccggctgctcgcggcggacgtcacggctcccggcaaggtcaccaccacgcgcggcggcttcctggacgacatcgccggtttcgacgccgacttcttcgggatcgccccgaacgaggccgcgatgatggaccctcagcagcgtctgatgctggaactcggctgggaggcgctggaggacgccggcatcgtccccgagcacctcgcggggacccgcacgggcgtcttcgtcggcgccatctgggacgactacgcggtccggctctacaagcacggcacccggcgcatcgaccgccactccgtgaccggactccaccgcagcatcatcgccaaccgcctttcctacacgctcggcctcaacggccccagcctcgccgtcgacgcggcccagtcctcgtcgctggtgtccgtgcacctggccgcggagagcctccgcgccggagagtgcacgctcgcgctcgcgggcggagtcaacctcacgatcgtccccgagagcaccatcggctcgaccaagttcggcggcctgtcaccggacggactgtgcaagaccttcgacgcccgggccaacggctacgtccgcggcgaaggcggcgcctacctggcgctcaagaccctgtcccgggcggtggcggacggcgaccggatctactgcgtgatcgagggcagcgccgtcaacaacgacggcgccacgcccggcctcacggtgcccagcgcacgcgcccaggaggaggtcatccgccgcgcgcacgaccgcgccggaacccgtcccgaggacgtccagtacgtcgagctccacggcaccggcacgcgcgtgggcgaccccatcgaggcggccgccctgggcgccgcactcggcaccgggcgccccgccgacgccccgctgcacgtggggtccgcgaagaccaacgtcggccatctggagggcgcggcgggcatcgtcggcctgctcaagaccatcctcagcatctggcaccgcgagctgccgcccagcctcaacttcgagacacccaaccccgacatcgccttcgacgaactccgcctgcgtgttcagcaggacctcacctcctggccccggcccgaccgcccactgatcgccggcaccagctccttcggcatgggcggtaccaactgtcacgtcgtactgcgtgagtggacggtcgacgactgtgcgtccgtgcaggacggaccggccgtcgtgacggacgggacggtgccgtggctggtgtcggcgaagtcgcgggcggcgctggaggagcaggcgcggcggctccttgaccacctggaccggcacccgcgggaaacgcccgctgaagtcggtcatgcgctggcggtgggccggtcggtgttcgatcaccgggcggtggtggtcggccgtgaaccggccgacttccggggcgcgttgagcgcgctggccgagggggagccttccgcgcaggtggttacgggtgcggtggccgcccgacccggcaagacggtgttcgtcttcccggggcaggggtcgcagtgggtcggtatgggcgtggagctcatggcgtccagccctgtcttcgccgaacacctgaccgcctgtgcggcggcgctggagccgtacaccggctggaacctcatcgacgtcctggcccaggcgcagggtgcccccgcgcttgagggcgacgatgtcatccagcccgcgctgtgggcggtgatgatctccctggcgcggctgtgggagcacctggggatcactccggacgcggtggtggggcactcccagggtgagatcgccgccgcgcacatcgccggcgtgctgtcgctggaggactccgcgcgcatcgtggcgttgcgttcgcaggctctcgtccagatcgcggggcacggcggcatggtttccctgccgctgcctttggccgatgcttcggagctgatcggacggtgggaggggcggctggtcgtcgccacggtcaatgggccgtcggccacggtggtggccggtgatacggacgcggtcgaggaactgcgagctcattgcgagaaggagggcttccgggctcgtcgtgtcccgatcgactacgcctctcacacgtctcacgtgcaccctcttcgcgaccgattgctggatgtcctggcgccgatcgagccgcgagaggcgagcatcgcgttctattccactgtcgccggtcatctgggcgggccgatggccgatgccacggtgatggacgcccggtactggtacgacaatctggccaccgccgtgcacttccaggccgccaccagcgctctgctggacgacgggcacacgctgttcatcgaggccagcccccaccccgtcctcacccaccccctgcaggagaccgtcgaggatcacgcgagcggtggcgaggtcgtcgtcaccggcaccctgcgccgggacgacggcacctggcagcgcgtgctgacctccctcgccaccgtccacacccacaccatcgcccccgtcgactggtcgggcttcttccccgccacccggcccacccacctcgacctgcccacctaccccttccaacggcgacgtcactggatcgacctgccgacggacggcgttgccgacgccgattccgacgcgtccgtcgatgtggtcgccgacgtggtcgccgaccggcccgaggacacggctccccctgccgagtccggcgcgtcgtcgccgctcctcgaccgcctcaggaaggcttcccggacccagcgggaacagatcctcaccgaccggatccgtgccgaggtcgcggccatcaccggacgtgtcacctcggagacggtggacggcgaccgcacgttcaaggacttcggtttcgactccttcgcctccgtcgaactgcggaaccgcctgagtgccctcaccggcctgaagttgccgacgacgctgctcttcaaccacccgacccccaccgccgtcgcccgctatctccggaccgaactcctgggctccgaggagtccggcagcatcgcccacggctccccgctcgccgccgccagcgcggacgaaccgatcgcgatcgtgggcatggcctgccgttatccaggagacgtccgcgcccccgaggacctttggcgcctcgtcagcgagggcgtcgacgccatcaccgacttccccgccgaccgcggctgggacaccgagaagctcctcgatcccgacccggaccgacccggtacgtcgtatgtcaccaagggcggattcctgtccgaagcggcggcgttcgaccccgcgttcttcgggatcggcccgcgcgaggcgacggcgatggacccgcagcagcggctgctcctggagacctcctgggaggcgatcgagcaggcgggcatcgacccggccgcgctgcgcggcagccagaccggcgtgttcgtcggcgccatgacccaggagtacggcccccacctgcacgacggcgtcgccgggttcgacgggtacctcttgacgggcaacaccgcgagcgtcgcctcgggccgcatctcgtacaccctcggtctgcagggcccggccgtgacggtggacaccgcctgctcctcctcgttggtctcgatgcacatggcggcccaggcgctgcgcaacggcgagtgctcgctggccctggcgggcggcgtcgccgtcatggccacgccgggcatgttcgtggagttcagccggcagcgcgggcttgcggcggacgggcggtgcaaggcgttcgccgaggcggcggacggcacggcctgggcggagggcgtgggcctgctgctgctggaacgcctctccgacgcgcggaggaacggccatcaggtgctggcggtcgtacgcggctcggcgatcaaccaggacggcgcgagcaacggcctgaccgcccccaacgggccctcgcaggagcgcgtgatacgccaggccctggccggcgcgggcctgtcggcgcaagaggtcgacgtcgtcgaggcccacgggaccgggaccgccctcggcgacccgatcgaggcgcaggcgctgatcgccacctacggcaaggaccggcccgaggaccggccgctgtggctgggctcgctgaagtcgaacatcggccactcccaggccgcggcgggcgtgggcggcgtcatcaagatggtcatggccatgcgtcacggcgtcctgccccagaccctccatgtggaccagccgtcctcgcacgtggactgggccgaaggagcggtggaactcctcaccgagaaccggacctggccggagagcgaccacccgcgacgggccgccatttcgtcgttcggtatcagcggcaccaacgcccatctcatcgtcgagcaggctccggagggcgagggtgccgccggtgagggtgtgccggagccggtggtggtgacggacgggacggtgccgtggctggtgtcggcgaagtcgcgggcggcgctggaggagcaggcgcggcggctgctggaccatctggatcgtcacccggaggcgacgcccgtcgagatcggtcacgcgctggcggcgagccgctccgtgttcgatcaccgggcggtgctggtcggccgtgaaccggatgatttccggggtgcgttgacggcgctggccgctggtgagccctcggcccgagtggtcgccggtacggctgcggcgcagccgggcaggacggtcttcgtctttcccgggcagggctcgcagtgggccggtatgggtgtggagctgatgcggacctcgccggtgttcgccgagcacctgaccgcctgcgcggcggcactggagccgcacaccggctggaacctggttgatgttctggcccaggagcagggcgctcccgcccttgagggcgatgcggtcatccagcccgctctgtgggcggtgatgatttccctggcgcggttgtgggagcacctggggatcactccggatgcggtggtgggtcattcgcagggtgagatcgccgccgcgcacatcgccggtgtgctgtcgttggaggactccgcgcgcatcgtggcgttgcgttcgcaggctctggttcagatcgcgggccgcagtggcatggtgtctttgcctctcccttcggccggtgcctccgagctgatcggccggtgggaggggcggttggtcgtggccacggtcaacgggccgtcggccaccgtggtcgccggtgacatcgccgcggtcgaggagctgctggctcactgtgagagcgagggtcttcgggcccggcgtgtcccgatcgactacgcctctcacacgtcgcatgtgcacccgctgcgtgagcagttgctggacaccctcgcttctgtcgaggcgcgcgcggccactgtcgcgttctattccacggtggccggtcatctgggcgggccgatggccgatacgacggtgatggacgccgagtactggtacgacaatctggccaccgccgtgcacttccaggccgccaccagcgcgctgctggacgacgggcacacgctgttcatcgaggtcagtccccaccccgtcctcacccaccccctccaggaaaccgcggaagaccacccgacgggcgagcggaccctggtcaccggcaccctgcgccgcgacgacggcacctggcagcgcgtgctgaccgcgctcgccaccgcccacacccacaccaccacccccgtcggctggtcggacttcttccccgccacccggcccacccacctcgacctgcccacctaccccttccagcaccagcgttactggctggagcggcccgagagcgcgggggacgcggccgcggccggacaggtgggggtcgaacacccgctgctcggtgcggcggtggagctggcgggcacggatgtcaccgtgctgaccggtcggttgtcgttgcagacgcacggctggctggccgaccacacgatctccggcaccgttctgctgcccggcacggccttcgtcgagatggcgctccgcgcgggtgacgaggtgggcgttgaccaccttgaggaactcgccctgcaggcaccgctcgtcctgccggcgaccggtggcgtccagctgcgcgtggaggccggtgagctcgacgacaccggacggcgttccgtgagcgtgtactcccggcccgacggccaggggacaggtgtgccctggacctgccatgccaccggcgtgctcgccaccagtggcccggcgccgtcctcatgggatccccgggtgtggccgccggccggggcggtgccggtggagaccgatgagctgtacccgtcactggccgtcctcggctatcagtacggccccgcattccagggggtgcggacggtgtggaagcggggcgacgaggtgtacgccgaggtggtgctgccgcaggagcggcacgccgaagtggccgccttcggcatccatcccgcgctgctggacgcggccctgcacgccgggctcgtcccggacccggtggccgggtgggaaccggagccgccgaggctgccgttcgtgtggtccgacgtgcggctgcacgcgaccgacgccacgaacgtgcgggtgcggctggccccggcgggccacgacgccctcgtgctggaggtcgccgacaccgagggcgcgcctgtcgcgtcggtcggttccttgatgatgcgtcccgctgaccccgcgaagctgggcggggcccgggacgggcaccacgacgcgctgttccgcatggaatgggtgagccgggcggtgcgggttgccgacgggaccccggtcggcccgtgggcgctggtgggcgacgacggactggggctcggcaccgttctggacgccgcacagatgcgtcgctacgcagacctgaccgcgctcaccggcgagttcgaggaactcgccaccaccgactccgcagacactttcgacgactcccggcccgaactcgtcctgttctgccacctgcccggggaaggcgccgcctccggcgatcctgccgccgcccgcgtcgagctgttcaaggcgctgtccctggtgcggtcgtggctcgccgacgagcggttcgccggcacacggctggcggtggtcacccgtggcgcggtggcggccgacgacgcggagcagccggacctcgcctccgcaccggtgtggggcctgctgcgcaccgcgcagacggagaacccggaccgtttcgtcctcgtcgacgtcgatgaggacgagcgttccctccgcgccctgcccgccgcgctcgcctgcggtgagccgcagttcgcggtgcgcgggggagaggtcctggtgcctcggctcgtccgggccgggtccgcggccgacggcgcgccgacacctccgcgggagcgggcggtggggcggccggacgcgaccatgccgtccgtgtgggatccggagggcacggtgctgatcaccggcggcaccggcacgctgggcgggcgcttcgcccggcacctggtgaccgagtacggggtgcggcggctgctgctggtcagccggcgggggcccggcgcggagggcgccgccgagctggtggagcggctggccgggctcggggcgacggccacggcggtggcgtgcgacgtctccgaccccgaggcgctgtccggcctgctggaggcgataccggccgagcacccgctgaccgcggtcgtgcacacggcgggtgtgctggacgacggcctggtctccgcgctgacgcccgagcggatggacgcggtgctgcggcccaaggcggacgcggcatggcacctgcaccggctcacccagggccgggacctgagggcgttcgtcctgttctcctcggtgatgggcgcgctcggcggcgcggggcagggcaactacgcggcggcgaatgtctacctcgacgcgctggccgcactccgccgggcccagggacttcccgccacgtcgctggcctggggcttctgggacgaacgcagcgagctgacgggggatctggaccaggcggacctggcccggatggcccgcgcgggcctggtgcccctgcggtcggacgaggggctcgccctgttcgacacggccctcgccctgggcgagcccacgctcgttcccgcacgcctggacaccacgcggctcgctaaggacgggaacgggccgctgcccgcggtactcggcgccctggtgcgtccccgtgccgcccggcgtaccgccgcggccggttcggcgggcggcgccacgggcggacagcggttcgccgggatgtccgcggccgacgcggagcgcgagctcatggaggcggtgcgcgcccacaccgcgaccgtgctggggcacgcgacgccggaggcggtccggccggacagcaggttcaaggacatcggcttcgactcgctgtcgtcggtggagctgcgcaaccgcctgagcgcggccttcggcctgcgcctgccggcgacagcggtcttcgaccatccgacgcccgccacgatggcccgccacctgcgcggcgaactgctcggcgaggcgacgcccgccgccgcacccgtggtcacggccgccgcgctggacgagcccgtggccatcgtgggcatgggatgccggcttcccggcggcgtcacctcccccgaggagctgtgggagctggtcgcgtccggcagccacgggatctcggggctgccgaccgaccgcggctgggacgtcgacgggctctacgaccccgaccccgaccggcggggcaagagctatgtccgtgaggcgggcttcctctacgacgcgggcgagttcgacgccgacttcttcggtatcgcgccccgcgaggcgctggccatggacccgcagcagcggctgctcctggagaccacctgggaggcgttcgagcgtgcgggcatccgcccggagtcggtgcacggcagccggacgggcgtgttcgtgggcgccatgccccaggagtacggccctcacctgcacgatgccaccgagggactggacggcctgctgctgaccggcaatacgaccagtgtgctctccggccgcctcgcctacttcctcggtcttgagggcccggccctcaccatcgacacggcgtgttcgtcgtccctggtggcgctgcaccaggcggcgcatgcgctgcgccagggggagtgcaccctcgcggtggccggcggcgtggccgtgatggccactccgggagtgctcaccgagttcagcaggcagcgcgctctcgcgcccgacggccggatcaagtcgttcgcggcctccgccgacggcacgggctggagtgagggcgtcggaatcctcctcctggagcggctctccgacgcgcggaagaacggccatcaggtgctggcggtcgtgcgcggctcggcggtcaaccaggacggcgcgagcaacggcctgaccgcccccaacgggccttcccaggagcgcgtcatccgccaggccctggccaacgcccggctcaccccggacgaggtcgacgtggtcgaggcgcacggcacgggtaccaagctgggtgacccgatcgaggcgcaggcgctgatcgccacctacggtcagaaccggcccgaggaccggccgctgtggctgggttcgctgaagtcgaacatcggccacagcatggcggccgccggcgtctccggtgtgatcaagatggtgatggccctgcggcacggggtactgccccgcacactgaacgtggacgagccgaccccgcacgtcgactggcccgcgggcgcggtggagctgctcaccgaggagcggtcctggccggacccgggacgcccgcgccgcgcggcggtctcctccttcggtatcagcggcaccaacgcccatctcatcgtcgagcaggctccggaggacaccggcgtcacccgtgagggtgtgccggagccggaggtggtcacggacgggacggtgccgtggctggtgtcggcgaagtcggaagccgcgctggcagagcaggcgcgacgtctcctcgaccacctcgaccgtcaccctggggtgacccccgccgaggtcggccacacgctggcggccagccgttcggtgttcgatcaccgggcggtgttgatcggccgtgaactggccgaccaccgaggcgcgttgaccgcgctggccgctggtgagccctccgcccgggtggtcaccggcacggtggcggcgcagccgggcaggacggtcttcgtctttcccgggcagggctcgcagtgggccggtatgggtgtggagctgatgcgcacctcgccggtgttcgcggagcacctcacggcgtgcgcggcggcgcttgagccgcacaccggctggagtctcatcgacgtcctcgaccagacgcagggcgccccagatctcgaccgcgtcgacgtcatccagcctgcgctgtgggccatgatgatctccttggcccggctgtgggagcacctgggcatcaccccggacgccgtagtgggccactcccagggtgagatcgccgcggcgcacatcgccggtgtgctgtcgctggaggactccgctcgcatcgtggccttgcgctcccgggccatcacccacatcgcgggcgacggcgggatggtctccctgccccttgccgtggcggacgccgaggaactcatcgcccggtgggaggagcgggtggtcgtggccgcggtcaacgggccgtcggccaccgtggttgccggtgacgccgacgcgctggcggagatcgtcacccactgcgagggcgaggacatccgggcccggaagatcccggtggactacgcctcccactccccgcacgtcgaggcgctccacgacgaactgctggagctgctggctccggtgcgcccgcgggaggcggaggtggcgttctactcgacggtgggcgaccacgccaagggcgcgatgagcgacacgacggcgatgggtgcggcgtactggtacgagaacctgcgcaccaccgtggccttcgaggcggccgcccgcgccctgctggacgacgggcacaccctgttcgtcgaggtcagcccccacccggtactcacccaccccctccaggagaccgtcgaggaccacacgggcgccggcgaggtcgccgtcaccggcaccctgcgccgcgacgacgacacctggcagcgcgtgctgaccgcgctcgccaccgcccacacccacaccaccgcccccgtcgactggtcgggcttcttccccgccacccggcccacccacctcgacctgcccacctaccccttccagcaccagcactactggatccagcagaccaccaccgcgaccgatccccacaccctcggcctgcacgccgccgaccacggcctgctcggtgccgccgtcgccctcgcggacggcgacggacacgtgttcacagggcacctgtcgctgcgcagccatccctggctggccgaccacgccgtccacgacacgtccctcctgcccggcaccgcgttcgtcgaactggccctccacgccggtcaggccaccgacaccccccacctggaagacctcaccctcgaagcccccctcaccctcccggccaccggcggcctccacctgcaggtgcacgtggccgcatccgacggcgacggccaccgggccctcaccatccactcccgacccgacgacgccacccccgacctgccctggacccgccacgccaacggcactctcgccccccagccgtccggcgcgccggacccggccgagtgggcggaactcgcggcctggccgccggccggcgccactcccgtgcccgccggcactctctacgaccatctcgccgaccgcggctaccgctacggcaccaccttccagggcctgaccgccgtctggcgccagggcggcgccctctacgccgaagtcaccctctccgacgacaccgacaacgccaccgccgccgaccactacggcatccaccccgcgctcttcgacgccgcgctccacccgatcgtcggcgccggccccgagcaggactcggaccaggtgctgctgccgttcgcctggtcgaacgtccagctgcacgccgtgggcgcccgggccctgcgcgtccagatcagccctgctgacgcggggacgctgcgcgtcaggctcgccgatcccaccgggcagccggtcgccgaagcggcatcgctggccctgcggcccatcaccaccgagcagttggcgaaggccgttgcggcgggaggagacgaccacctgttccgcctggcctggacccccgcgtccgtcacggaggagctcaagaccggccgtgtggcgttcctgggagccgccgttcccgaggcactggtcacatcgctgcccggcgatgtcgcggtcgagcgccacgagaagctggcaccgctgctggcggacgacaccgctctcctcccggacctggtcatcgcgactggcctgctggagcgttcccactcgggcgaggacgtccccggccccgcgcgcgaggccgtccagtacgccttggacctggtccaggagtggttggccgaggagcggctggccggcagccggctcgtgttcgtcaccaggcgagccgtcgcggtccatgccgacaccgagtcgcccagccccgcggacgccgctgtctggggcctgatccgtacggctgaggccgagaatccgggccgcttcaccctgatcgacctggcggacgagaaggccatcgcatccgagtcgttccgcgcggcgttgggaagcggcgaaccgcaggtggccgtgcgtgacggcgatcagcggctgtacgtcccccggctcgtacgggaggtgcagcccgacgacaccgccgtaccggagcccgccgcgggcggcacggtgctgatcaccggcggcacgggcaccctcggcacactgttcgcccgccattacgcgacggctcggcaggccggccatctgctgttgaccagccgacgcggcccggacgctccgggcgcgcgcgaactcgccgccgaactgaccgaactgggtgtgaaggtgaccgtcgtcgcctgcgacaccgccgaccgcggcgccctcgccgcgctcctcgcggccgtccccgacgaacaccccctcaccgccgtcgtgcacaccgccggcgtcctcgacgacggcaccatcacctccctgacggcggaacgcgtcgagcgcgtcttccgcccgaaggtcgacgccgcctggcacctgcacgagctcacccgcgagagcgacctcaccgagttcgtcctcttctcctccgcggcgggcgttctgggcacgccgggccagggcaactacgccgcggcgaacgtcttcctcgacgcgctggccgaacgccgtcgcgccgacgggctgcccgccacctccctggcctggggactgtggtccgacagcagcggcatgaccggccacctggacgacgtggacctgacccggatggctcgcctcgggatcaagcccatcacggcggaggaaggggtggcgttgttcgaggcggcccgtgccacgggcgccgcctgcctggtccccgccaagatcgccccagccctgctccgtccccacttggagaccggcactcttcccgccgtcctccagggcctggtgcgcgctcccgtccgcaaggccaccgtggccacggcgaccgacggcgccaccctccgcgatcgcctggcccacctgtcaccagaggaggccgaggacaccctcgccaccctcgtccgcacccacgtcgccctcgtcctgggccacgacacgtccgacaccatcagtctcgacaaggcgttcaaggacctcggtttcgactcgctgaccgcggtcgagctgcgcaaccgtctggcgtcctcgaccggactgagcctggcagccaccctcgtcttcagctacccgaccccacgtgaactggggcggcacctgcacgacctgctgcgtccggcagcggacaccggctcggccgaggacgcggggatccgggaagtgctgcggaccgtcccgatcgaaaggctgcggagcgcgggcatcttggagctggtcctggcgtgcgccgacccgtctcagccgaacgccgacggccaggcggcggacacggacaccggcgcggacgagctggcggacttggacctggacgcactcgtcgaccttgttctggatgagaagggtgagtgacatgaccaactccgcggatcgcacagcggacggcgcggaccgggtccaacgggcgctccgcacgctgctggaggagcgcgaccgcctccgccaggagaacgacgccctgaaagccgggcgcggcgagccgatcgccgtggtggccatggcctgccgctacccggggggcgtgtcatcgcccgaggagctgtggaatgtcgtccgcgacggcctggacgtagtgggcgagttcccgcaggaccgcgggtggcgggacatcttcgacccggatcccgacacgctcggcagctcgtacacgcggcacggagggttcctgacggacgcggccgccttcgacgcggggttcttcggcatcagtccgcgtgaggcgctggcggtcgatccgcagcagcgcttgctgcttgagacgtcatgggaggtcttcgagcgggcgggcatcgtgcccgccgatgtgcgcggggccgacgtcggggtcttctccggcgtgagctccgccgagtacgggacgcgtttcgtggaggcgagcgggcacgacctggagggctacctgctgcaaggcagcgtgctgagcatcgcctccggccgagtggcctacgaattcggcctgaccggaccggcggtgagcgtggacacggcgtgctcgtcttcgctggtggccgtgcacctggcgatgcagtcactgcgctcgggggagagctcgctcgcgctcgcgggtggggcggcggtgatggcgacgcccgcgctcttcgtggagttctcccggcagcgcggtctgtccgccgacggccggtgcaggtccttcgcggacgcggccgacgggaccggctgggccgagggcgtgggggtgctgctcctggagcggctgtccgacgcccgccgcaacggccacccggtgctggccgtcctgcgcggttccgcggtgaaccaggacggggccagcaacgggctgaccgctcccaacggccgtgcccaggagaaggtgatccgcaaggctctggcgaacgcgggggtctcggccgccgaggtggacctgctcgaagcccacggcaccggaaccacgctgggggatcccatcgaggcaggcgctctgctggcgacctacggacagggacgggccgagggcaggccgctccggttggggtcgctgaagtcgaacatcggtcactccatggccgccgccggggtcggcggggtgatcaaggccgtgatggccatgcgccaccggtacctgccgaagaccctgcacgtggatcagccctcacgccacgtggactggtcatccggtgcgctcgaactgctgctggaggggcgtgagtggacccgggcgggcggcccgcggcgggccgcggtgtcgtcgttcggcgtcagcggcaccaacgcacacgtcatcctggaagaggccccgcggcaggaacaggcggacgagggcgatccggactcgggcgtcgtcggcggcctcgtgccgtgggcgctgtccggcaagagcgcggcggccgtgcaacagcaggcgcgtaagctgcgcgaattcgccgtcgccgacccgggtctcgatgtcgccgatgtcggctggtcgttgacgtcgagccggacccggttcgggcaccgcgcggtggtcctgggacacgaccgggacgagctgttgagcggcctgacggcgctcgctgccggcgaggagtccgccgcggtggtgcgcggcacggcccgggagctcggcggtacggtcttcatgttcccgggacagggttcgcagtgggtcggtatgggccgtcagttgtacgacaccttccccgtcttcgcgcagagcctcgacgcgtgcgcggccgccttggccgagtgggtcgactggtcgctgctcgacgtggtgcgcggcgtggagggggcaccgacgctggaccgggtggacgtggtgcagccggcgttgttctccgtgatggtgtccatggccgccctgtggcggtcctggggtgtggaaccggccgcggtcgtggggcacagccagggcgagatagccgcagcccacgtctgcggcgccctgtcactgcgcgacgccgccaaagtcgtggcgctccgcagcaaggctctggtggatctgatcggtcacggcgggatggcgtcggtcgcggagtccgcggatgtcgtggcggaacgtctcgctccgtggagcgaccgagtgagcatcgccgtcgtcaacggaccccgctcggtggtggtgtccggggaacccgacgccctcgacgaattcgtcgagaagatgaaggccgaaggcgctcaggcccggcgaataaaggtcgactacgcgtcccattcacatcacgtggcccgggtccgtgaccaggtgctcggcccgctgtccgacatgagcccgaagacgtcgacgctgcccttctactcgaccctgtacggcgaggtcatcgacaccgcgcagctgaacggcgactactggtataccaacctgcgcgagaaagtcgtcttcgaaacgtccgtccgacggctggccgacgacggtttccgggtgttcatcgagatgagtccgcaccccgtgctgaccgtcccggtgcaggagatcgtcgaggacgtggacgacgcggtggtcctgtcgtcgtcgcggcgggatcgcggggaggtggaggccgtgctcggctcgctggccgggctccacgtccagggcgggtccgtggactgggacgttctgttcgggacgcgtcgacgggtggatcttccgacgtacgcgttccagcggcagcgctactggctgaactccgtgcacacgggggtgacggcggaggtgtccgcgctggagccgcccgcggctgacgacgatcccgtcgccctgccggacctgatcgccgacctctccgacgacgaggcgacggcacttgtccttgaccacgtcctcacgaaggtcgccgtcgtgctcggacacccctccagcgaggccgtcgaccccgaccaggaattcaaggacatcggattcgactcgctgctctcggtgcagctgagcaagggcctggccacgacgaccggactcaagctgaggccgaacctggtgctgcggcacccgacaccgaggcgggtcgccgggtacctcaagacctcgatggccggtcgcgaccggcggtgaacccacggtgtacggggcgcctgggccccgcacaccgcccagccgacggaccgcgagtccgccggcgaccaggctcgttccggctttcctgagaggatgatctctgtgcgttcgttcggtgcgtcgtctgcgcacaaagggttgtggcgggcgcaggaaatgttccccgacacactgaaccatgcgctcaccctgtggaacgtggacggtgagctggacgcggccgtcatggaatccgcgttcctgcatgtgatgggcgaggcggaagtgctgcgcgtcaccttcgtcgacgacggcgacgggctgcgcctcgtgcccagggaactgggcgactggcggccgttcttcctggacaccggcgccgaggacgatccggagcaggcggcgcgcgaagcgctggccgacatggtgcggcagccgttcgacctggagcgggacctgctgttccggctgggcgtggtcagactcgcggcggcccgctccgtgctggtgatcatctaccaccacctcatatcggacgggttcggcgcggccggcctgctgtcgcggcgcctggccgaggtgtacacggcgctgtcgcggggtgcggacgtaccggagctgccgcacccgtgggatgccgagtcgttcgcgaccgaggcggcgcagtacagcgcctccgagcagttcgccgaggacacggagttctggcgcgactacctggcggacgcgcccgcccccgcccggattccgcgtgtcgccctgtccgacgcgatgcggtccgcgctctccgaaccgatgggcagcgccgaccgctggggggagttgaccgagcccatcggcatggtgagccgcacgctgaccgttccgcacgccgatgcgcaggcgtggaccgaggccgcgaagtccatgggcgtgtggatgtcgtcgatgctgaccgcggccgcggccgtgttcctccggcaccgctgcgaccgtccggagttcctcctctcgctggccgtggccaatcgggtcggggcggcgagcaggacgcccggtctggcggtgaacgtggtgccggtgcgggtgaaggttccgctcggtgcgaccttcaccgagatcgccgacgcgatcggcgacgagacgtacgagatcttcgatcacgcggcctgccactactcggaaatccagcgcgcgagcggaaccgtcctcaacgatcgcggcagtttcggcgccgtcgtcaacgtcgtcgagttcgcggaacgcctccgcttcgccgacagcccggcgcacttcctcggcgggacgaccgggaccttcgaagaactcgcgatcggcgtctacaccgacggaaccgccgacagcgacctgttcatccggctcgacgcccccgcgagcctgtactcccgcgcggagctccgtttcatcggcgaggacctgatcgcgcacatccgcgccgtggtggccgccgacgaacaaccggtcggcgcgctggacgtggtgagcggtgccgagcgggaccgggtgctcacggcgccgaacgacacgaatgtgccggtgccggggctgagggttccggagctgttcgcccgccaggtggaccgggctcccgacgccgtcgcggtggtgtccggggactcggcggtctcgtaccgggaactggacgagcgctccagccgcctggccggggcactgcgacagcggcaggtcggacccgagacggtcgtggcggtggcgctgccccgatcggtcgacctggtcgtcgctctgctgggtgtggtgaaggcgggcggagcctacctgccggtcgacccgacgttcccggcggcgcggatcgcgccggtggcccgcgacgcctcggtgcgcgcgttgctcaccgatatggcgacagccgaagcgctctccggcgatctggatgtgccggcgatcctgttcgacgacatccgcccggacaccgccgccgacagcgacgctgcgacggaggttccgctcccgtcgcgtcaggacggcctgctggccgtgatgtacggctccggaccgaccggtgcggccacaggagtcgccgtgacgcaccggaacatggagcggttcgccctggaccgccgctggcgggaaggcggccgagacaccgtgctgtggcatgcgccgcacacctccgacgcgcttcccctcgaagtgtgggtgcctttgctgaacggcggccgcgtggtcgtggcccctccgggggagctggacatcgacgcgctgaccgaggtgcgagcggcgcacgagatctccacggtgtggctgcccgcgggcctgttctcggcgatcgcggcagaacgccccgagcgtctggccgggttgcgcgaggtgtggaccggtggtgagcgtgtgtccgcggccgcggtgcgacgggtgcgggaggcctgccccgagctgacggtcgtcaccggccacggcccgacggaaacaaccgtgttcgccgcgtcccaccgcatggccgcggacgaaccggtgcaccacgcgggcgcggtcggccgcccgatggaccacacggccctctacgtgctggggccggggctggcgccggtccccgtgggcgtggccggagagctgtacgtggccgggcccggcgtgacgcgtggctgccccgggcgacccgggccgaccgcggagcggttcgtaccctgcccgttcggtccggccggcgcgcgcatgtaccggaccggagaccgggtgcggtggagtaccgacggcctcctcgagtacgtgggccgggccggcgcccgggccgacgtacgtggtacccgggtcgaactggccgaggtcgaggaagcgctgtccgaacacaccagccttgcacggtcggtggtggtcgtcagcgaggacacctccgggcagcagcgccttgtggcctatgtggttccggtgggcggccggaccgttgcgggtgacgaactgcgccggttcgccgcggggcggctgccggagttcatggtcccgtcggtgttcgtggtgatggaacgcctgccgctgaccgccggcggaagggtggaccggtattcgctgccggagcccacgttcgatgacgacaagtaccgggcaccgcgcgaccacaccgagcgggtgctggccgaggcgttcgccgacgtgctcgagctggaccgggtggggatcgacgacgacttcttcgaccacggcggcaactcgctgcgggcgatcagactgaccggcctgatccgggcggagctgaaccaagaggtgcccatccgcacgttgttcgcggcgcgcaccatcgccgggctgtccgactcgtggaaggagctcgcccggtccagcaggccgactctgcgcaggaggacgaaggaaggcgaagctctgtaggtgttccgccgtcatcttcggcagaggcgagatccataccgccagacaccccggtcgacctggccgaccggggtgtcgctccgctgcggcccaccctccgcgcacacgaacacaccgagccgggcccctggccggctccgcgacccccgcccgggcggcaaggtgtcggccccggagagggaacctagcggactgccttccgggcggcggagaggtctcggacggtggcggagatgatgtcgttgacctcctgaccgtgctcgtcgaggtagaagtggccgccctggaagacgtgcagggagaactcgcccgtggtgtgctcccgccaggcatcggcctcggcggtcgtggtgtgcggatcgtcggtgccgaccagcatggtgacggggcagtcgagccgcacaccgatgacccgggggtgggtctcgatggccgtgtaatcgccacggacggcgaagacgatggacgccctcagatgcttgttctccaggtagacggggtcggtgccgccgacggaacgcagttcgtcgatgatgccgtcgtcgtcacggcggtgaaccgttccaccgcgcagcagggagggcggggggtagccggaggcgagcagccaggcgggcggagcgccggtgtcgtcctggtagcggcgggccacctcgaaggcgaggacggagcccatgctgtggccgaagaagacggtgggccggccgtcctcggagcgacgaagtgccgcgtaggtgaggtcggcgagttcggcgaagttctcgacgcagccctcggcacgccggtcctgccgacccgggtactgaacggcgagcacgtccaattccggtgagagagcttccgacagtgcgtagaagtagctcgcagaacccccggcgtgcgggaagcagacgattctgaattcgctgtcgtcggcgggatggaagcggtgtatccactccccgtcgaatttccctgaccctgtcatgcacgacctttctgtgtgtttaccgaatacggcccgcggtgcgggagcggtccgagcgtagcggagctgttcggaaaggaaccggcaacccgaacaacctcttctccatggggagcacaccgggttgtccggggcggaactcgatgagcgcatcgaattccggcgggccccggtgggttcaggcgggccggtggtccaggagggatgccacgaggctggtgtcgacgttgccgcccgagaccagtacgccgatgtcccgcgcctggccgtcggcggccaggcgcagggcgccggccacggcggtggcggcggcgggctcgatgagcagacgggcgtgcacgaggaccaggcgcagcgcctgggcgatggcgctctcctcgatggtgaagaccccggcgacggtgtcgtgggccaggtcgtaggggagttggccgatgcggtcggggcgcagtccgtcggcgatggtgggccgggcgtccacggtgaccggccccccggcctgcagggccgcggtcagggcggggacggcgctgggctcggcgccgtagacgtcgatgtcctggcccgtggtggccaggcaggcgccggccagcgcgctgccgccgcccacgggcagcaccaccgcgtccaggcggccgtcagcggcgtccacctggtgcagcaggtccacggtggcggtggcctggccggccaccacgtccgggttctggtaggggtcgatctcgtccaggccgcgggtgtgtttcagttcctcgaccaccgcgatgcgctcggccagggtggttcccacctggatcacctcggcgccggtgtcccggatgcgcgtcaccttggccggtgcggcgtcggtgggcagcaccagtacggccgcaagcccgtactgggcggcggccagcgccacggctatggcgtggttgccggtggactgcgcgaccacaccagggcttttggcccccgccagccgctccacggcaaggagcgcgccacgcatcttgaaagagccgccacgctggaggttctccgccttcagccacagccgggccccggccagaccctccagctcctcgctgcgcaccacgggtgtgtgcactacacggccggcgatacggcgccgggcatcgtgcaccccgtcatgactcagcagcggcggctgcccggcgaaagtcacggcattcgcgccgaccgacatgaatacgtctccgcttctctgcgacatcgaggcgtcctcgggatgcaagccgcgcgccgaaaagagcaaaccaacagcatgtgcacgcggcggagcttccattcatgtcctgtcgacgggacacgaatgcacggcccgcgcggatgcgctgatacagcggtgcgcgtcggctgagggggattattcaaacagttcatcgtgccgttccactttggcggcgcctccgatggaaatgcaagcccgcccgggcgtacggacttcccggagcggaaaagctcccctttgttcgagggcctcaagcagcttgatgcgatcgcactgatgaccccagccggaactctggaacggcgaaggccccctcgtcggtgagggggccttcgtgtggggagcgcccggcaggccttgcacctgcattccccatcggatgatgggcgtctttccttggaccacggacgcttgactcccgtgccgtgcaccggagttgggtgaagagcgtacacggtgtcggacacggtcgaagcggggcggcgtacgccaacgccgtgtcggagtacgccgccctcggtcgggacgagctgggggaggtggtcggccaggtcgtcccggctacttcgggtcgcggttgtataccgactgtgcccagacgtagccgagcgcggagaggcccaggcaccaggcgatcgagagccacccgttgtggccgatctcggtgccgagcagcaggccgcgcacggtctcgatgaccggcgtgaacggctggtactcggcgatcggctggaaccagcccggcatcgagtcgatcggcacgaacatgctggagatgagcgggaggaaggccagcggcatggcgttgttgctggccgcctcgacgctcggactgaccaggcccattccgaccgcgatccaggtgagcgccacggtgaacagcgtgagcagggcgaatgccgcgagccactccaggggcgtggcgtccttggaccggaagccgatggccacggcgatggcgccgacgaagaccacgctgatgatcgcctgcagcgcgctgccgatgacgtgcccgatgagcacggagccgcggtggatcgccatcgtgcggaagcgggcgatgatgccctcggtcatgtcgttggagacggacaccgcggtgccgaccatggtgttgccgatggtcatcagcaacaggcccggcacgatgtaggcgatgtacgcggagcggtccgcgtgtccgccgccgatgcccgcgctcatcacgtcgccgaagatgtagacgaagagcagcaacagcaggatcggcgtgaacatcaggttcagggtgagggacgggtagcgccgcgcgtgcaggaggttgcggcgcagcatcgtggacgagtcgcgcacggcgagggagatcccggtcgggcgggcgggagccaggggagcgttcatcggacagcctcctcggccttgtcggcgccgccggtcagggcgaagaacacgtcgtcgaggtcgggggtgtgcacggtcagctcatccgcctcgatgtcggcggagtccagccagtcgaggatggagcgcagctcgcgctggccgccgtcactgggaatctgcaacgacagcgcttcgtcgtcccgggtggcctcgcgcagcgcgagggcggcgctctgatagacggacgggtcggagaagcggagccggacatgtccgccggggatcagccgtttcagctcctcggcggtgccctcggccgcgatctggccgttgttgagcacggcgatgcggtcggcgagctggtcggcctcttccaggtactgggtggtgaggaagatggtgatgccgtcggacagcagctcgcggatgatgcgccacatgttgtgtcgtgagcgggggtcgaggccggtgctgggctcgtcgaggaagatgatgcggggattgccgaccagggtcatggcgatgtcgaggcggcgcttcatgccgccggagtaggtggaggcgggctttttcgcggcctcgaccaggtcgaagcgctcgaggagctcggcggctgcccgccgtccctcgcttcgtggcaggtggtgcaggtccgccatgaggagcatgttctcttcgccggtgatcagcccgtcgacggcggagaactggccggtgacaccgatcgcggcgcgcaccccctccggtgacgtggcgacgtcgtggcccgcgacctgagcctgcccgccgtcggcgctgatgagcgtggacaggatctgcacggtggtggtcttgccggcgccgttgggcccgagcagcgcgaagaccgagccggccgggatgtgcagatcgatgccgtcgaggacggtcttgtcgccgtacgacttgcgcagaccggtggcggagatggcggccgacgacgtgtgaccgtcggccagcccagacgtgggcatgacaaaagaaggcatggtgccctccgttcgaaggctgaagtgggtgaggggcggggccggttgacggtgtggcgctcaggccgcggcgcggaggatgtcgatgttgccgtgctgggtgcgggcaatgacctcgaccgtgtcctcggtcttcttcggcgcctcggacacggtgagggcgttgcgcacctggccgaagcccgagctgacgtcgagccaggcggccgtgccctcacggacgccgacctcgatgccgccgtaggaggtctccagctgaacggtaccgctggccacttcaccgaggcgcacggcgccgttggtggtggtggcggtgaccgaggcctcggcccgccggatcacgatgtcgccgtggacgctgctcgcccgcagctcaccgatcgcggcgtcgacggtcgtggcgccgtgcgagttcttcaggacggcggggccgtcgacgaggccgacgcgcaggctgccggtgctggtggtgatctcggccctgccctcgacccggtccacgctgatcgaaccgttcggcgtggtcgcatggagcggcccggtggtgccgaggcggacctcaccggccgacgtcctcacccggacctcgccgaactggccctcggcgagcacctgggcggcgccaccggtcatgtcgatccgtgagcccgtgggcagctcgatcatcacgtcgatgatgccggtgcggccgaacagactggccttgggcgtcttcacggtcagcacaccgttcgcgtacgtgacctcggtctgcttggccgtccgcaggtcctggtccttcccgggctcgtggggccgcacctcgacgacggtgtcgaggcggtcgcccgcggtgaactggatggaaccggcttccacgtgcaccgtggcagagatcggttcgggggtgtcgaaagaaggcatggctgtcccgtcctcttgggtctccgggccgtccctgctggtgggacgtggtatgggtgaagtggtgcaggcaggggcgcggttagcgcacccagcccgtcatgttctgtccgacggtctgggtcttccccgtcgtacgcggccgggcgccggcgttgaccgcggccgacacggtgcgcaccagccacgcgttgaccgacagaccctcgcggttcgcggcctgttcggcgcgggccttgaggtgagccggcagacgcaggttgacgcgggcggtgccgccctcgtcgccgtcggcgggggctgggagcggttcgacgggtgcggtcggctccgcgggggtgccgctgtcggcgggcggcagcgtcagcacgaactcggggtcgagcccgcgcagccgaatgtcgaccgaacccggggcgagttcgcgggtgatctcgtccatcgcggcggagagcacgttgagcatggccaggtgggtcgccgactccagaggagcgacgagccgctcggccagctcgcgggcgtcttccccgctggcttcagcggccaccaccagttcgcggcggagggtgtcgatatgcggggtgaggtccatgacgtcatgatggcagcactgtggtgccatgcgcaagcccgcgtggcaccttaggcgagaagtgcctcaatgcaaccgctctaccagcggaaacgtgaagggatcgcccgggtcatggtggtgccacacgggtgaaaggtcggctggggagcgcggcatggcgcctgagtgacatggagtgatgccgtatgacgccaagcggtgtcgctccgcggtgcgcatggccgtggtcacggatcgacgtcggcgaaactgccgccttcgtccgctgcggcggaaacgggccgcagacggtgctgctgcacggcgcgcgatcccgacatggtgcgggccatgcgggagggctaccgcgccgaactcacgaccgaccggcggcgcgagcgggccgaccgcgacgccgtcgggcgcatcgttcgcccgacgccgatgctcttctcgctccgggatgacctggaggacccttacggcgaccccgtcgcgatccggcgccggtgggccaccgaagtgcgcgggcacggcaccggaactcatcggcatcgaccggcacgccgtcgcaccgcccggcggagccatcgtccacgccggcgaacccaccgggctgctccatgagtgcggccaggtcctcgttcaaccgccctcggcgtcctcctccttgcccgacggcatggcgagcaccgccgagaagttcgcccgcaccctcacgggcctcggcgacacgggcggcaccgatccgcgctgccttgcgacccacgacatcaagatcttcggcgacggcgccgtcctgcaagacggcctggatgcacggcggctgcggctccctgtgcgtgaacggtgccaccgacaccgagcgcaccgccgagaccgacgccgtggtccggcacgcccgcgccgccgggcaccagccagacgtccacgtcaccggcgaccgggcctgccacaccgccgcggaggccttcgcggcggccccgggcacccgcgccccgatgccgcaccacgtcatcctcggcgacttcctgaccgcgcacagcctggaggtgccggccgtgcacggcttcggtgccgacatgaaccccctggtcgcgacaagcgtccgcggctcggcgatcgtcgcgtcgtcgaggtcggccgatcgtatggaggccggctgtccggcgcatcgtcaggccggacggacaggccacctcgcagccctggcgacgggcgaagccagtggcagggcgccgatggaggcggcctggccgacacctacgagggcggcgccgtttccgggccgcagctcggcgaagacctcgcggaatgtgcgctcgctgtcgggcagccgcttgtcgaagctctgcttcccggccgacatcgaccggattcatcggaccgtcatgaaccgcacgggcattgactttagtgtcgctccgttattcctttctcaccgggaaccgctccggaatcggttccggaatgctcgatgtcttccatcagaggggaataaaggtgtcgcacacacagtcggaacggacggcgcacgaagaacgaaaggcatcgccccggcgttacctgatgtgccgtcccatgtacttcgacgtcacctactcgatcaatccgtggatggacccggatcgccccacctcgacacagaccggactggcccagtggaaagggctgttcgacaccttcgtcgacctgggccatgacgtacagctgatcgagcccgtaccgggacttcccgacatggtcttcgccgcgaacggcgcgatcgtcgtggacggcaaggtgctcgtcgcacgcttccggcacccccagcgcagggacgagtccgcggcatacgaggagtggttccgcctcaacggctggtccacggtccagcaggcggagtacgtcaacgagggcgagggcgacttcctcttcacgggcgaggagttcctggccggcaccggcttccgctccgaatcgcgggcccacgacgaggtgcgcgagttcttcgggcgccccgtgaccagcctgaccctcgtcgatccgcggttctaccacctcgacacggcactggcggtgctcggggacggggagatcatgtacaaccccgtggcgttctccccgcagagccgggcagtgctggccgagcggttcccggacgcgatcctcgccgaggacgccgacgccgccgtgttcggcctcaacgcgctgtcggacggccgcaacgtcgtcctgccccggaaggccgccggcctcgcggcgcagttgcgcgagcgcggctaccaccccatcggcgccgacctgaccgagctgcttaaggccggaggcagcgtcaagtgctgcacgctcgaactccgcgaatgaggcgcgaagccatgtgagggcagcgtggaccgcgggctgtcccgtcgacgggacagccgcaccggaacgcgcgagagaaacgatgaccattcacaccgcatctcaactcggaccatcaaagcgggggttcggtagttccatgccggggtgaggaacaacggaaccgtaatttgtggtagcactaattccacgtgatcgacccggccttcgagggggatgattcggccagggcggcgcggcatgcacaagccgtcggacggcaaggggctgaacttgggtgtgcattcgtatcccaccgacgggacgcgaatgcacggcccgcacggatgtgctggcacatcggcgtgtatcggctggtccggcgtacttgaattggttcatcgtgccggtctacgttggcggcgcggccgatggaaattcaatcccgcccggacgtggatccttctgggagcggacgattaccggtcgaagatgtgaacagcacatcgcacagtcatgcctgcgggagagaatcttctatgagtgatcgtgaacacgagacctatgacgtggtcggcattgggttcggtccgtccaacctgtcactcgccatagccctggaagagtaccgggcgaatggtccggagaatgagatcagtgccctctttctggagcgtcaatccgcgttcggctggcaccgcaacatgctgttgccgtcgacgaccatgcagatatccttcctcaaggatctggtcactttccgcaatccgacgtcgagtttcagcttcatcgcgtacttgcacgcgtcggggcggctcccgcagttcgtcaacaaccaggatttcttccccacgcgccaggagttccaccagtacctcgagtgggcgcaggcacgggtggccgatcgcgtcgcgtacggctcggaagtgacgtcgatccggctgccgccgggtgccgatccggagcggtcggaccggctgcgcctcgaggtggcggatgccaccggccgcaacggccgcgtggtcgaggcacggaacgtggtgatctcgaccggcctggtcccgagcatgcccgtgggaaccgagcgcgacgaacgggtgtggcacagttcggagttcctggagaagtaccgccggatgaaccccgcggaactgcgtcgggtggcggtggtcggggcgggccagagcgccgccgagatcaccaggttcctgtacgacgagcttccgcacgccgaggtgtgcgcggtcatcccgtcctacggctactccgtcgcggacgacacccccttcgccaatcagatcttcgaccccggggccgtcgacgactactacttcggcaccgagcagacgcgggaggcgttctggcggtaccaccgcaacacgaactactcggtcgtcgacgacgaggtgattcgggatctgtaccgcaggtcgtacgacgacgaggtacggggtgtgcggcgccttcagttcctcaacctgacgagggtcaccagtgtcaagcgcgtcggcgccgagacccgcgtctccctgcaggtgggccccgacgacgaggtgcgcgaactcgacttcgacgcactcgtctgcgcgaccggctacagcacgatggagcccacggacctgctcggcgatctcgaccggcactgcctgcgcgacgaggcgggccgataccgggtggagcgggactaccgcatcgtcaccgcccccgagatgcgctgcggcatctatctccaaggtggtaccgagcacacccacggactgacctcctcgctgctgtcgaacatcgctgtacgaagcggtgagatcgccgactcgatcgtcgccggccgtgcgggacggaacgccgagcgggcactcctcgccgaggtcggcggcgacacccgctgaaggcccgcaaaagaaagaacgggaccgggcgccacacccgcgacacccggtcccgcatgtctatgtctcctgcgagggacggatcggatccccgaggaatatccggcatcccggaggcgcggcttcgggagattcggtgatcgtgacggattccccggtgggccgggattcccaggtatttccttgtgtcaccgatcgtgccgatcactacatgtttccggcggacggaaagggggcttccggatgaggagtccggtggaagagcggtgggtacgccgcttccgtgacgacgacgggtgcgcgacgaagctcgtctgtttcccccatgccggcggctgggcgaacgcgtaccgtacgtggcatctgggactgccgtcggacatcggcgtactcgctgtccggtacccgggccgggaggaccggctcagcgatccgttcccgtccgggctggaagccctcgcggacgacatagccgacgcactcggcgagctgacgcggcatcggctggtgctgttcggccacagcatgggagcttcggtggcacatgaggtggcgctgcgcttgcagaaacggggatgtccgccggctgccttgtgcgtgtccggcagacgcccgccccatgcgctggacggccagcggcggttgtccggcacggacgaggagatcgtcgcggacgtcgtgcgcttcgacgagagcagggccccggtcttcgcggaccctgacctacgggagatcctgctcccggcggttcgcgcggactaccggttggtggacgactaccgcggtggccgccgacctctgctcgactgcccggtgtacggttacgccggtgacgacgattccgaggtgaccccgaagcagatgcgcgactgggcggacacgacgcacgacgccttccgtctccgggtgctgcccggtgggcatttctacctcagagcccaggaagccgcgctgctggcggacatgagaaacgtactgggtcgcatcaagtcccgtacgagcgcctcctcatgaggactgcgcgccctggatcgtaagaactcaccttgcggcgtacgggactccgtcgcgggccagatcctcatcgagaaggctgccgccgtacatccaacggtccgagagaccccggtcggcggtggctaccgcacccagccgttgaactgctgcttgccgcgaggggttcgcttgctgttggtcagcgccgcggcggaggctcggaccatccaggcgttgaccgagatgccctgtctggacgccgcctcctcgatctgatccttcatcgcctgcgggggtcggaagttgatccgagccgtcgtgccgctcatggcgccactgagcgctccggccgaccagtcgctcgccgcgtcaccggtctcatccgtggtgtcctcggtggggccgtcgtcgcccgagggcggagtcaccacaaaactgggctccatcccgcgcaggcgcaggtccaccgagccgggtgccagctcctgggtgatctcgtcggccgcggccgacagaaccttgagcaacgtgagccggacggccgactccagcggagcgacgaggcgctcggcaaccgcgcgggtctcggcgtctgctgccgcagaggttgtgaccagttcgtcgcgcagcgcatcgacgtactcccgtagttccatggagacatcatggcacactgattgcgccggtcggcgcctgcttggcccattcccgcgcgaccccctttggccaggtgaaacgtgtgatgcctcgacgagtcggctgccactcttggacttggcggctcgacgtggggccataagggcgccaggtcatatgccgcacgcggagtgcagccacgtgagtgccaccgcagcgcgcggatcaaccgcggtcacgcgagagcgggccgaggagaaggcggtcgtattcggccacggccatcacgctgttctcccgccacctcgctgagccaggtgtggcgggagagcttcagggggcggtgtggcaggcgcgtgatgccgtacggggcatgccacggacccttgcgtgctacgtggctgcctcgtacgccggcaccacgtgcaaaggggcaggccccggagagcgggggattttcctctccggggcccgcgagggcggcaccgatgaaccgacggggggacggtgtcggtgccgtgatcgtgaccagcgatcagctggtggtgccgtcggccgccgcgtcggatgtcctcgtccctgaccctcggggcggggcgatgacgaaggccggtttcggaacatcggtcgctcggcgagagagccacttcgttctccgcctcagcggcgaccgggatcttgcgccacagattgtcacgtactgcgaccgatccgtggcgccagtatggcatcgctttggcccccttgcaagtctcgcgtcctttgggtcgcagttgaagaaggaggccctgccgctggcaagtccccctgagcggcagcgaggtgccgctggcgccacgggtggggggatgtggcgccacgtcgccctcggtgacattccacgtgcaggcgcggagcccggctgcgatcggactcattccgcgcaggaacgctccaccacgacgtcgccgatcacggtccgggcctggacgcgcacgaactcgtcggcctgctcccacgctgccaggagcgcgagagacgtgtagacggtgcctgcggcggagtcgagggacaggcgggcgctggtggtctcggccacgccgatccggatgttgccgaacgtggtgacggcgacgacggttccccgcgccacctctccgatgtcgatgccgccctgggtcgtccgggcctccacgtcggtgtgcgcccggctgatcctgatggcccccttctcggtgtgcatgcgggcgactccgcgcacctttcccacagtggcgtcgccatcgcccatcgctctgatcgtggcccagccctcgacctgcctcaggtggacgttgccccggttcgccgtggcctcgacgctgccggccgcacggccgaccgtgatgtcacccagggaggaggtcagttgcaggctgccggtacggtcgagcccgatgcgccccaggcccgtgctgagttggcactcgcccagctctcccaccgcgaggaagtccgcggccatgccccgcccgtgcaggctcgatcctgtcggcacggctatcaccacgatgaccgcgcccccgctgccgccgggctccgggacgttcacgagcagccagccgtcggcgtattcgatacgcagctgctcggcggcttgcacgtcgtcctggtcgtcgctgtcgcgcggatacgcctccaccgtcgtctcggcgcggtcactcgcggcgatgcggacctggccgaacatcaggttgagcaccacgcggacaggcgcgggtgtgtcgaacgtcggcatggcgagccgccttcggaatgtctgaggccgccgatctggtgcagacggcagcccgaacgacgcaggtcgctctgtcacggggttggtctccggtctcggggtgcgagcgaccgggggtacgggcacgtaccgctgggggacgcggcgggttctggcccgccctcgccacgccggacacttcgccctccgccccgcgcgcgtcgcgtcccgtgcctgcctgccctttgtcgcccaccgtccgggctctccggccggggcctttcgaccctgcccggaagagaactggtgggggcacctttcggttcggagcgtaattctctgctgacatcatgtggtgccacattagtgtcataacggggtgtccgggcggggtgcgcctcggaactccatgtgacggcgagcggaatcggtcacagacgtacgggcgtgccccccgggattcgagtcgggtcatccagccgtcaccgaagtccggaagcgtgggaacgctccctcaccgatgtcgccgatgtcgccgacgctctgacggactgccggatgaagaagcgggccccggtggtgccatctccgcaccggctctgcgacaggcggcacggatcgccttgcgtctcggccggcctcgcagggaggtgccgacatattccagccaatgtaaggctgtggccgactgctgtgccgcctgcccctctggggcgttccgcaggtcacggtcgcgacgtcaacagagagccggacgcccgtatcccgctgtgacatgctgcgcgccaagatggcgtcgattgacagtagacatggcgccacatgatgtcatcatggcgctatgacagctctgcgatcgctctgcttcccgggagagttccgcgccggcacttaccggcgcttcacggcggcccccgacgccccctcgccccgggtgtccggagcgcggatgccgctcggcaacgggcggcgcaccgagcggggcgcgccgtgaaccaggcggcgaccaccgcggggccgcaccggccgctccccggaccgcacggcccctcggccatccaggtccggggactgcggaagtcgtacggaacggagaccgccgtcgacgacctccatctggatgtcccccacggcaccgccttcggcctgctggggcccgacggcgccggcaagaccaccgtgatgcgcatcctctcggcgcgcgtcgccgccgacgccggcgagatacgcatcgccgggtacgacctccccacagacgccgacgccgtacgcgcggccgtcgaactcgtcggccggacttcggcggtggacccccgcctcaccgccgagaagaacctgctgcggacatcggccctgtgccgactgccgccccgcgagggcgggtcgcgggcagccgaactccttgcgcggctcgatttgtcacgggtcgccaccgagcctgcggctgccttgtccagcggccggcggcgtcggctcgatctggcgatggtgctggccggggatccgggcgtcgtcctgatggacgagcccaccgcgggtctcgaccccgtgagccgccgcatcgtgcgggaggtggtgcgcgatctcgtcgccgacggcatcacggtgctgttcaccacctgctcgcctcaggaggcgggccggctcgccgaccggatcggggtcctgcgccgcggtcggctcgtcgccgagggcacgcaggacgcactgctacggctggtcccgggcggtcacatccgtctgtacttcgccgacacggccgaactcgccaccgccgccgcgctgttccacctggacacggtcgtccgggacgacaccgcgctcagcctgcggatcccgggcgacggcagcgtcggcctgatccgcgccgtcctcgccattctggaggagggccgcgtggagcctcggcggttggcggtgcacagtcccggactggaggacgttttcaccgcgctcgtgcacaacggcccccagggtccgccacccacccaccgcgccgtgcactcgccggacgccccactcggggaggaagcgcgtgacatccggtggctgtggcgcgaggtcctgcccgtcatggccgcgttgctgctgctctgcgcgcatgtcgcggaggccgggcccgccgtcctgcccggcgtgcttccggccgccctggtgtgcgtggcactcgcgctcgccgggcgccgcagacgtgccgccccccgttcgccgaagcaccgcggccctcacgcgtagcccctgaccgcgtcggcgccgaccgttgcgtcccaagtcctttcgacacacctcgtcttcgctacgtactaacgggagttggatcacattggctaccttgctctacaggatcggccgcttcgccttccggcgacgaggtctcaccgtcctgctgtggctcctggtcctcgtcggggccggagtcgccgcttcatccgcgccgccccctcccaccgacaccttttccatgccgggcacacagtcccagaaggccgtcgacctgctgaaggagaagttcccggccgcaagcgccgacggtgcctcggcccgagtcgtggtccgcgcaccgtcgaaccagaagatctcgaaccccaagccgaagaagaatgtggcggctctcgtcgaggacctgtcgaaggccccgcaggtcgtcgcggcctccgatccgttcaccacgggcgccgtcagtaaggacggcacgacggcctacacgatcgtcacgtacaaggtcgccgccctgaaggtgtccgacaaggcgcatgacgccctgagcaaagcggccgccgacgcccgcgcgaacgggctcagggtcgagatgggcggtgacgcggtccccgtgaagcaggcggcgggcggctcctccgagagcgtcgggatcggcgtcgccgctctgatcctcctggtgaccttcggttcgctggtggcggcgggcatgccgctgctcaccgccgtcgtgggagtaggcgtcggcatctccgcgatcggcgccctcggcagcacgctcggcctgtcctcgaccaccacgaccctggccatgatgatcggcctggccgtggggatcgactacgccctgttcatcgtctcccgctaccgcgccgagatggccgaggggcgacagcgggaggaggccgccggccgggcggtcggcaccgcgggctccgccgtggtcttcgccggcctcacggtcgtcgtcgccctcgccgggctcgccgtcgtcaacgttccgatgctgacaaagatgggtctggccgcggcgggcaccgtcgcgatcgccgtcctggtcgccgtcacccttgtaccggcgctgctgggcttcgcgccgttcaaggtgttgcgccgcagggaccgcaagcggatcgcgggcaagccgctgtccgggcgtcagcgtcgcaaggcggcgaaacgggcggcccggcagcggccgaacctgggtgcccggtgggcgagcttcgtcatgcgccgtcccgtcatcgtcctgctgttcggggtcctcagcctcggcgccgtcgccgctcccgcgacccggctggaactcggcctgcccggcgagggcaccatggcccccgacaccacccagcgcaaggcgtacgacatgctgtcggagtccttcggccccggcttcaacggacccctgacggtcaccgtcgaggcccacgacgccaagaccgtgggcaaggacgtcgccgccaagctgtccgacgagcccggcgtcgccgaggtgggctccgtgaccccgaacaaggcgggcgacaccgcgatcgtcaacgtcgtaccggacaagggaccgacggacgacaagacgaaactactggtcaaaaacctgcgcggcgacctcgcccgggtcgggcgtgtccatggcgccgaaatcctggtgagcgggcagacggccatgttcatcgacttctccaagaccctcagcgacgcgttgctgccctatctcggtctcgtggtgggtctcgctttcctgttgctgatcctcgtcttcaggtcgttcctcgtgccgttgaaggccgctctcggattcctgctgtcggtgtccgcggcgctcggtgccgttgtggcgatcttccagtggggctggttcgccgacatcgtgggggtggaccagcctggcccgatcatgagcacgatgccgatcatcatgatcggcgtggtcttcggcctcgccatggactacgaggtgttcctggtgacccggatgcgcgaagcctatgtccacggggagtcgtcccggcaggcggtcgtcaccggcttccggcacggtggtcgcgtggtcagcgcggccgcgctcatcatgaccagcgtcttctccggattcatcacacaggacaacgtcttcgtacggatgatcggcctcggcctggccctggcggtcctcttcgacgctttcgtcgtccgcatggccatcgtcccggcgctcttcgccgtcctcggcgaccgcgcgtggtggcttcccaagtggctcgaccgcatgctgcccgacatggatgtcgaaggcgagaagctgtcgcgccggctcgcggccccgcgggacctgcgcgcggcgcgcgaccacgagtacagccgctgatgcgcgccgtgggggccggttcgatcccggaatcggtccccacggtcgagaggacgtcgcgccgcgtcgctacggcacccgctgtgccgtgttgcggcacggcacggcggtgagcccgtgcaggcgctggaaggcgtacgcggcggagacgagtgccatgtggtggtaccagccggggaacgagcgtccctcgaagtccagaagcccgaagtcctgctccatggaaccgatcgcgtccgtcgtcccgcggtgcagtgaggcgatcgaggcggcctccgcgagggggtggtgggcgaggctggtgagccacagcaggcccggtgagcgggcggggcccacttcggtgaagagccggtaaggaggtccgggggagcggccctgggagccgcccgccagatggacgagtgaggtctggaggtgtgtgatgcgctgctctccgccgggcaggtggacgagggccgtctccgggctctgtgcggagaccagggttcttgcgcgcgctggtaccggggcgccctcgcgggcgggcagcaccgccagatgcggtggcaccgcgacgacgaagtcgcggcggcgcttggcgagtccgtgcagcagatatcccacatcgggttcgtcgctcatgtcgacgagaacgaccgaggacgtggagtgcgtgcgggccgccagccggtccacgagtcggagcgtgtgtgcccactgcggccggtaccgctcgaagtccggtatacgtacgtccctgcgccgttcggggtcctgtgtccaggtcgtcggcaggtgcaggcaccagtcgacgggaacgtgagcggtgtccacgcacaggaaggatcccagtcccagctggcagttgagcgtacggcccgaggacaggtcgaaatagcggtggacacccaccgaccggtcaccacgcttgggcaggacggcccggccgatggaccacacgggctcgggtcgacggtccgccacccagtgggtgagttcctccatgacctcgtcgaaatcccatgggctgagactcacgaattggcgcagcgactgcacgacggacgggtcgcgggagaccacggtggcgagccggcgcaccgacttcttgcccgaggtgacgagcagccctttcaaataggcgtgtgcccacttacgttgatcggtccggcgtaagcctttgaagatcgtgctgctaaaccggttcagaggcaattctgaattgatggcgcacctagcgcctcgtgaagtcgacgaggtgtccgcttgggtggtattcatgccgcaataactcccccgatgttactgagcgttgtgatggcagagtctaggtcccgctccagtgtggcgccactgtaagaggttggtcgacctgttttggcgcctcgatggcgcacggcctcggggtcctggtggcaggatgacggctagattcagctcatcccttcatggggtgggccgctggccctcgttgtcggcgacagtgtgtggacttcgcgatcacggtgtgatgacctgcgggaatgtggcgcttgcgtactcgatcggggcggtggcgaggggtggaggtggcgcttgagggggccgtgatgcattgcggctcctgattcggagcgccgcaggccctgggggcgcacctagatcacgccaaagcagtggcctagaccactgaatcagaggagtgttcgaactctgcaaagtagtgctcgatggcgccaagatccttgaaccggcatcgatgtcgggatctactcgggagcacggcagttggccatcccgacctcaacgggtaaccgtgcaatggctggttcattcagcccggcagtactcatctgcgagcggtggccactgctcttggcatgcgtgccaaaaaacggggtgaacgctttcggcatccgatggggagccaccgcgaacccgcttggtcgatacgcgcatttacggggaggcgtgatgacgaatcaggtcgaggactgcaaagactccaaggcggtcatgttcggcagagccgcggaggctgtgccgaggaaccgaagagccggtggggtggattcgcggggtgatcaggtactcaccacgaaggtgggactgcacatacccattggactcgccttcgaggagtgggaacgcgccgggcgccagctctccgggctgctcaactcctcgtcctggtggctcggggactggctcgtctacggcaaggaccactatgcggaccgctatgagcgcggcatccgcgctgccgggctgcaataccagacgctgcgcaactacgcctgggtctcccggcgcttcgagctgcaccggcggcggcccgcgctcagctttcagcaccacgccgagctggcgtcgctgccgctcgacgagcaggaggtctggctcgaccgtgccgagcggatgaagtggagcaccaagcaactgcgcaacgccatccgggcccagcgcgagcccatcccgcagcagacggacgccgtggcgacgacgagccggctcgccgtgcccgacaaccggctgcagtggtggcacaaggcggcggcccatgcgggcaccgagttgggggagtgggtgacggccacgctcgacgcggccgcggaccaggtgctgaaggatgccgaccggcaacaggatgccgaccggcaactcaccctcgaatgaccggttcatgagaaccggcccgtaaggcggtcgcgtcggggacaggcgggggtgtccggccggggcggtgaaagtcacggggtccgcacacgtcaaggggtgcggaccccgtgtcatgggtggaaccgttacggcagacggttcatgagatccgccgtctgtacgtgccgggtgcattcgcgcccggcgaatgactgcaccacccgctcgcgaatctcgggacgctgttcctggctgagcttgaacattccctcggccttggtcacccggacacggaaagcgccgacgccggtcactatcttgcggaaatagtcgaccgattcgctcatgtcccagctgtcgccgaattccccctcgaaggcttgcacggtcgcctgtacgacatccagggtctcctccgtcgactcgatcttctccaccactccgtgcacatgcaccgaggtgaagttccatgtcggggcggcaggcgtgacgtcgtagacggtgggcgagacgtaggcgtgcggaccggtgaacgtcagcaggatcgccgacccggtttccagcgccgcccagtgcggattggcacggttcatgtgacccagcagaggcatgcccgccaggtccgcggtggggctgccctcccactgggggtcggtgatgaccgggaggtgggtggcgaaaggtccgtcagcgggagttccattgctggccatcagtgccagcgggttcccgcgcatcagatcgaccatccatgagacgtccggttcccggtagtggctggggacgaacatacagcactcacctttcgtggtgtgacgaaaacagtgcctgtccggcatcgaggccttgagacgcggcaatgatgcggcgaatggtcgacgacatcgccgtactgtcctgttggcaggacaacggggttctccatcgtggcccgttgtcgtctccggcgcaatgaagggacgaaccggcatcaacgaatcgtccggcgggaacggaaagaggaagcccggcggtatcgaatcagaacggcggtgagtttccatgccgcagcctgtacctggaaaaggaccccgtcagccctcaggaggaattcatggaaaacgggcaggcggtcctggcagcttctccggaggcggccgctcggccaccccggcgtccggtccggattctggtcaggagctcgaagcgacggcggcttgccgcacgccgcgggacttggtgtgatgcgggtgttcccgagaacatcgccgagcagggtgaacgcgcggccccgtgcggtgttcaactgctctgcctcggtgaacaacgagggcggccacaccgggcccgagccggaccgccccgacccatccggatccgacccccgcggcggatgggccggggcacccctcgacgttccgatctacgggcttcggacctgaggccttgaggaagacgcggatctggcgggcacggctggtctcatggagggatcgtcgcccacgtgtggtgcggggaacggggcggttcgtcgcccgcacctcccacgcgctcggatcaggccgggcggccgcgccgtaccgcctcgatgccggccgcaccgtcgtgtgcctcgtcgacgatctcgatgtccggggccgagccgagaatggtgcgcaggaacccgcacaccatgggctcgtcgtccaccaccactacccgggccacgctcacaccgccgattcggaggtcgggacgaacacgggcagcgtcgcctcgacgctgaacccgccgtcggaacagggtccggcacgcaacgtgccgtgcacgagctcgatgcgctgccgcagtcgggcgatcccgagacctgagccggtaccggccagggcgccgcgaggtccaccggtcggtggcgtgtcgcggaccgtcagccgcagctgtgccgtgtcgtactccacgcccacgttcacgcgggcgccgggagcgtgcttgcgtacgttggtcagcgcctcgcgcagcacgcggtaggcggtgcgcccgaccaccggtgaggccatcgccggatcgccttcctcgatcagctcggtcggtatccccaccgccacggactcggcgaccaggccggcgaagcccgccaccgagggcgtccggtcgccctccggcgcggtgcgcagaatgccgaccaggtcccgcagctcctccagcgcctggcagcccgcggagcgcagttcctcggccgcctgccgggtcgcctcgtcgggtgccgtcaccctcagggcaccggcctgcagcaccatcaggctcactcggtgggtgaccacgtcatgcatctcaccggcgagccgggcgcgttcttcggcgcgggcccgctccgccagcagatgacgctcccgttcggcgcgctcggcgcgctcgaccagtgcctgcatcagcctgcggcgggtgtcgaagtacagcgccggcagcggcccgatcgtccgttactacgggcgatccgcgctccagtactacgtgtccacggtcgcctccgtgtacttcatgggcctgctggcgcactgcgtgctggtgagcgtcgtcgaggtcctgctcatcacggcggtcggcaggctttacggcgtcccgttgcccgccgcctcgcggtggcccgtgctcgcggtgtccctggtgctcggcgccgccggtcgtgcaactggtgctgttcccgctcgtgttcatctcgggcacgtacgtgccgatccactccgccccgctgaacggcatcgccggtgcgctgccggtgaaaccgttcaacgacgccctgctccgcgccttcaccacgaaccacgccggcctcccctggcgggaccacggcgtcctgctgctgtggggggtggccggtgcggcggtggccgtccggcggttccgctgggatccgcgtgcgcagtgagcgacccggcccgggaccatgcccgccccgggcacgagggccggggcgggtgcgaggtgcctacagctccgtgcgtaccgtgcgggccgcggtgaccaggttctccagggaggctcgggtctccggccagtcacgggtcttcaggccgcagtcggggttgacccacagccgctcggcggggatcgccttcaggccggtgcgcagcaggtcggcagcctccgccgcgctgggcacgcgcggcgagtggatgtcgtagacgccgggtcccgcctcgcgcgggtagccgtgggcggcgagttcacgggccacctgcatgtgcgaacgggcggcctccaggctgatgacgtcggcgtcgagatcgtcgatggcctggacgatgtcgccgaactcggcgtagcacatatgggtgtggatctgggtgtccgggcggacgccgctggtggtcagccggaaggcccgcgtggcccactccaggtacgcggggcggtcggcggcacgcagggggagggtttcgcgcagggcgggctcgtcgacctggatcaccgaagtacctgccgcctccaggtcgttcacctcctcgcgcagggcgagggccacctggcgggcggtgtcggcgaggggctggtcgtcgcggacgaaggaccaggcgagcatggtgacgggaccggtgagcatgcccttgaccgggcggtcggtgagggactgggcgtacgtcgtccagcgcaccgtcatcggctcggggcgcgagatgtcgccggccaggatcggcggccggacgtaacgggtgccgtaggactggacccagccgtgctgcgtggcgaggtagccggtgagccgctcggcgaagtactggaccatgtcgttgcgttcggcctcgccgtgcaccaggacgtccaggcccgccttctcctggaaggcgatcacctcgcggatctccgccccgacgcgttcctcgtatccggcggtgtcgatgcggccggccctcaagtcggcgcgcgcggagcgcagttcgccggtctgcgggaaggagccgatggtcgtggtggggagcgcggggaggcgcaggtgggcgcgctgggccgcggcccgctcggggtatggccggcagcggcgcgcgtcgtcgtccgtgacggcggcggtgcgggcgcgcacggccgggtcatgggtgatgggcgagtgtgcgcgggaggccagatcggcccggttcgccgacagctgcgcggtgatcgtgtcggtgccgcgggccaggcccttggcgagggtgacgatctcggccgtcttctgccgggcgaaggcgagccagcgcaggatctgcggctcgatgtcccgctcggccgccgcgtcgagggggacgtgcaggagtgagcaggaggccgacacgtcgacccggtcggccaggccgagcagggtgccgagcgtggccagggaggccgacaggtcgttgccccagatgttgcggccgttcacgacaccggcgaccagccgcttgccgggcagtccgccgacggccgcgagcgcgtccaggttggcggcggccgcctcggtgaagtccagggccaggccctccaccggtgccttggccagcaccggcagggcatcgccgagccggtcgaagtaggaggcgaccagcagcttgggccggtcggtgagggcaccgagatcgcggtaggcgcgggcggcggcgttcagttcggccggggtacggtcctggaccagggccggctcgtcgagctgcacccactcggcaccggccgcgcgcaggtcggcgaggacctcggcgtacaccgggagcagacggtccaggagggtgagcggctcgaagtccgcggacaccccgggcgcgggcttggcgagcagcaggtaggtcaccgggccgaccagcacgggacgtgccgtcaactccagggcgagggcttccttcagctcggagacctgcttgccggagtcggccgcgaaccgcgtgtccgggcccaactcgggcacgagatagtggtagttggtgtcgaaccacttggtcatctccagtggcgcgacttcctgcgtgccgcgggccatggcgaagtagccttccagcgggtcggcggcgacggccgcccggtgccggtcggggatcgcgcccaccatgacggtggtgtccaggacgtggtcgtagtacgagaagtcaccggtcgggacctcgtcgacgccggcctccgccagctgccgccagttggtgcgacgcagttcggcggcggccgtgcgcagggcgtcggcggtgacccggcccttccagtggccctcgatcgccttcttcagctcccggccctggccctggcgggggtagccgtacacggtggcccgtgctgccgcggctgcggacttggtggtcacggagatctccttcgcgagatgaatccctgagatcccggggacgggacgagagcgcgaaggggtgacgtaccggacggcagcggccgtcggccgtccgttcggtcacgcacgccgacccgccctcgaggtcaccgggattccgcgcacgagtcgtcccgtacgcgggcagttggcaggtcttcggactcgcgggcacgtcctcatgggggaggacacctactggccgtcgcttcccagaccctgtacatcgggcccagtgcgtatgacggcggtcgttcccgctcaccgctgcggggcagtcccggatttccaccgggttccctcttacgacgcgtcccgcctggctgacggggcgaaccagctgcaccggccaccctacggggtcgggtcgtacatgtggaatccccgaccggccttgcggcccagcagccccgcttccaccatccgctgcagcagcgggggaggggcgtagaggggttccctgaactcgtcgtacagggactcggcgatcgaggccacggtgtcgagcccgatcaggtccgccagcttcagcgggcccatggggtgggcgcagcccagttccatgccggcgtcgatgtcggcggcggtggcgaagccggactccgtcatacggatcgccgagagcaggtacgggacgagcagcgcgttgacgacgaaaccggcccggtcccgggagcggatgaccgtcttgccgagcgtgagcgcggcgaactcctcgacgacggccgccgcttcgggcgccgtgtgcagggacgtcacgagctccaccaggggcagtacggggacagggttgaagaagtgcagacctacgacccggtcggcgcggctcgtggccatgccgaggcgcatgacggggagggaggaggtgttcgtggccaggacggcctccgggtcctcgacgatcttgtcgagggccgcgaacacctccgccttggcgtcggcgttctcgacgacggcctcgacgaccagctgccggtcggccaagtccgccggctcgccggtgaagaccaggcgggcgagggcgtcctgtgcggcggaccgctccagcttgccccgccgtacggcacgctccagggaagccgccacccgctcccgcgcggcgtgggcggccgtggcgtcggcctcgcagacgatcgtgtcgatcccggcccgcgcgcacacctcggcgatgcccgcgcccatctggccgccgccgaccactccgacacgccggatgccgccgctcatgaccgggcctgcgtccggcgcaccaggtggcgggcataggcgtccggggtgaagaagagcggcaactcaccggtcagtgccgtgcgttcgaagagggcccggacctcctccacgggtgcccacgggtactcggcgcccagcgccgcgagttcctcgtcgagcagcccgaggaccgtctcccggtcgatcacccggtgccgcagccactgccagatctgcacccgggcgatctcggcggtggccgcgtcctccatgaggccgctcagcgcgacggcgccctgcccgcgcagccaggcggcgaagtagcgcagggcgaccgagatgttggtccgcacgccctccgccgtgggcggcccgctgatccggcgcaccgagagcagatccgcggccgtcacctccacgtcgtcccgcgtccggtcgagctggtgcggacgctcgccgaggacaccgtcgaacacctcgcggcacacgggtacgagtgcggggtgcgcgacccaggagccgtcgaagccgtcctcggcctcccgctccttgtccagccggaccttggcgagcgccgcctcgtgggcggccgggtccttgctcggcacctgcgccgccataccaccgatggcgtgggcgccgcggcggtggcaggtgcgcacgaggagttcggtgtacgcccgcatgaagggcgcggtcatcgtcaccttggcccggtccggcagcaggaagtcggtgcggtggccgaaggtcttgatcaggctgaagaggtagtcccagcggcccgcgttgagaccggagctgtgctcacgcagctcgtagaggatctcctccatctcgaacgcggcggtgatcgtctcgatcaggacggtggcgcggatcgtgccccgggggatgccgaggagttcctgcgcggtgacgaagacgtcgttccacagtcgggcctcgtagcggttctccagcttcgggaggtagaagtacgggccgtgacccgcgtcgatctgccgctgcgcgcagtggaagaagtacaggccgaagtcgacgagcgcggcgggcacggggcgtccgtcgtactccaggtgctcctcgtcgaggtgccagccgcgcggccgtacgacgacggtggcgagccgctcccgcccgtcgagccggtactccttgccgtcgtcggcggtgaagtcgatgcgccgctcgatggcgtcgagcaggttcagctgcccgtcgatcacatggcgccaggtgggcgcggtggcgtcctcgaagtcggccatccacacctgggcgccggagttgagggcgttgaccgtcatacggcgctcgggcgggccggtgatctccacacggcggtcggtcaggccgggggcgggcggcgcgacgtgccaggtggcgtcggcgcggacggcggaggtgaccatggggaagtcgagcggggacccggcggccaggcgcagggcctgccggcggcgttccctcatcaggtcctgacgccgcttgccgaaggccgccgccagccggccgacgaagtccagggcggcgggggtgaggatttcatcatggcggtgccccggggcaccgaggacgcggacatgatgggtcagtgaactgatggacatcgggtctcctgaagaggacgcaaacgaagggtgcggaccgaccgtcattccgtcgaacacacctgggggcgcggggctgtatcgacacgcggccaccgccgcgtgtgcgcgaccagcccccacgcacccgcagtcgacgaaccggacctagtggaactgctcctcctccgtggacccggccaacgccgtggtggaagaggcgggattcacggcagtggagaccaggtcgaaatagcccgtaccgacttcacgctggtgcctgaccgccgtgaagccgtgcgcctgcgccgcgaactcccgttcctgcaggtcgacatacgcggtcatgccgtgctcggcgtaaccgcgggccaggtcgaacatgccgtggttcagggagtggaacccggccagcgtgatgaactggaagcgatagcccatcgcgcccagctcccgctggaacttggcgatctggtcgtcgtccagcgcggccttccagttgaaggacggcgagcagttgtaggcgagcatctggtccgggtaccgggcgtggaccgcctcggcgaactcccgcgcctgcgccaggtcgggcgtacccgtctcgacccagatcaggtcggcgtacggggcgtaggccagaccgcgcgcgatgaccggcgccatgccgttgcggacccggtagaagccctcggccgtgcgctcgccggtgacgaactcggcgtcgcgctcgtcgacgtcgctggtgagcaggttggcggcgagggcgtccgtgcgggcgacgacgagggtcggcacatcggcgatgtcggcggcgagccgggccgcgttcagggtgcggatgtgctgcgaggtcggcaccagcaccttgccgccgaggtggccgcacttcttctccgaggcgagctggtcctcgtagtggatgcctgccgcgcccgccgcgatcatcgccttggtcagctcgaaggcgttcagcgggccgccgaagccggcctcggcgtcggcgacgatcggcgccagccagtcggtcgtgtcgccggcgtcctcggcggtggcgatctggtcggcgcgcagcagcgcgttgttgatccgacggaccacctgcggaacggagttggcggggtacaggctctggtcggggtaggtgtggccggcctggttggcgtcggcggcgacctgccagccggacaggtagatcgcctgcaggccggccttgacctgctggacggcctggccgccggtcagggcgccgagcgcgtggatgtagtcccgctcgtgcagctcgcgccacagccgctcggcgccgcgccgggccagtgtgtgctcctcgcggacgctgccggagagccggatcacgtcctcggcgctgtaggtgcgctcgatgccccgccaacgcgggtcggtggcccagcgccgcgcgagttcctcggccgcccgcgtcctcgtctctgccatgactgtcatgtctcctcggtctgtgccggctgccaatctccctgtccgtaggaacaggtgtggcactgtgtgtcgcttagctgggatacggcccgccgtcacgccgtgggacggaggtgagcaacgctgccggtgaacgaccccgtcggcgccgggatctccgacgtcagggcatgaatcgcgccccggttccgggcggtggtcgccggtgtccggcgggccgcactgagactctgacactggcactgagtgccaacaaccgtggacatctgccaacttctgcgaatcttctcgtcgccgttcgccaagtttgcgaagggcacgggagcggcccgatggcgtacgttggccgcagccggacacggaggatcacggggtgggcaagacgtacgccggggcgcgcctgcggcacctgcgcgaggaacgacgcatgagccaggccgagttggcccgtgtcctcgccatctcgcccagctacctgaaccagatggagcacgactcccggccgctcaccgttgcggtcctgctgcgtctgaccgaggccttcggcgtcgacccgggcttcttctccgcgcgcgacacgacgcgtctggtggcagacctccgcgaggcgctggccggggaactggccgaggcccgggtctccgccgccgacctgacggacctcgcctcgcggacacccgaggtcgcccgggtcctgctcgacctcggccgccgcaaccaacggctcgccgagcgcctggccggagccacggacggccgcggcccgggcccggagcagcccggctcaccgcacgaggagatcagggacttcttctaccgccgccagaattacctccacgacaccgacctcgcggcggagcggctctcccgggagatcggcatccggcccggcgaggtcctacgggcgctgaccacgcgcctcgccgaccgccacggcatccggctcaccgccgagcgcggcgaccatctgcaccactacgacgagccgacccgcacgcttcacctgtccacccgtctgcgccccggccagcgcgccttccgcatggccacccagctcgccctgctcgaacacggcgacgaactcgaccgcgaggccgccgaggacttcgagcccggatcgcccgcccacggcctggcccgcatcggcgtcgccaactacttcgcggcggccctgatcctgccgtacgacgccttccacacggccgccgaggaggcgcgctacgacatcgagcgcctcaccgaccgctacggcctcggctacgagaccgtctgccaccggctgagcaccctccagcgccccaggctgcgcggcgtgcccttctccttcgtccgtgtcgaccgggccggcaacatgtccaagcggcagtcggcgaccggcttccacttctcccgggcgggcggcacctgccccctgtggaacgtctacgaggcgttcgccgtccccggacgcatccacgtccagatcgccgaaatgcccgacggacagcgctatttgtggaccgcccgcgcggtgacccggcaccgcggcggctggggtgaacccggcaagaccttcgccatcggcctcggctgcgagatccgccacgcccaccgcgtcgtctactccgacggcctcgacctcgcgaacgcctccgccgccacccccatcggcatgggctgccgtgtctgcgaacgcctcgactgcccccagcgcgccgcaccgcccctcggccacccgctgcggatcgaccagaacaccggcaccttcgtgccgtaccccgtctccgacgcccggagttgacgcggtcggcgggagaggaagatcacggcgaccgaggcggtcttggccatgcacgcctggcgcggtacggtctgtccgatatcgacgacggcgagacggaagccggtgggaatccggcacggtcgcgccactgtatgcgagacgccttccggggcgtctggtgagtcagacccgtggccgtcgtcatgtgcaccaccgagatgggacgcgaactcccagaggaggttctgccatggcgcagaccgtcgcccagccgacagccaccacccccgtcgttcccgccacgctgccgctgaaggcgattgctccctgggcggtcttcttcggcatcctgatgctggtcctgctctacttcgtcggcgccgagcagggcgccacctccgtgttcaacggcacggacgtccacgagtgggtgcacgacgcccgccacctgctcggcttcccctgccactgacgccagggacgccgcacccccatgaactccgcaacggtaagaaacctcctcgtgcggggcatgctcgccggcctggccgccggcgtgctcgccctggtcgtcgcctacctgctcggtgagccgaacgtcgacaaggcgatcagcttcgaggacgcccactcccacgagcacgagatggaggtcgtctcccgctccctgcagtccaccgccggtctcgccaccggagtcctggtctacggggtcgccttcggcggcatcgccgcgctcgcgtactgcttcgcgctcggccgcgtcggccggttcggcccccgggcgaccgcgctgctgctgtccggctgcgcgctgctcgccgtgtacgtcgtaccgttcctgaagtacccggccaatccgccgtcggtcgggaaccccgacaccatcggcaagcggacgaccctgtacttcctgatgatgctgctcagtgtgctgctggcggtcgccgccaccatcctgggcaagcggctcgcgcccaccgtgggcacctggtgggcgaccgtggccgcggtggccgccttcgtcgtcgtgatcggcctggcctacgagttcctgcccgtcatcaacgaggtgccgaaggacttcccggccaccctgctgtggcggttccggctttcggcgctggccatccagaccgtcatgtggacaggtttcgggctgctcttcggcgagctggccgagcgcctgctgaatcccaagcccgcgacagccgcgtccagacgcgcggttcccgcctcgcactgaacgcttccggacaacgagagggcccttcggaaccatccgagggccttctcgcgtttccgggacaccggcggaggcgacgagcggaggagccgagtggccagacaccacccccagccgcgtcacatcaccctgggcggccgagaagcggtggccctgaccgtgcgggagtacgagcaactggtcgccagccgacgccagatcggcggccagagcgcacgggtgcgggtactggcccagcaggtcaagcgcgacgcgaggctgctgcgggaactcgaggccctggtcgccgacccggcttcccccttcgcctgtcacgcgccgggcgcggcagccgggacaccggacgcggccgggtgccccggccacgacggcacggccgacggcatggatcctgcctgtctgcggtgcgccatcgcggcgctgctgcgccgccaccgggaggagaagccctagcccccgaccgcgggcgccggtgtcagtgacccggcgcgtcgcccggcgcggcgagggcggctccgagacgcaggttccaccgccctgaccggccggtgacctccgtcgcggtgagcggcgggacgtcgacgcgccagaacgcggcctcgggcgcgcccagcacccccaccaccacggcccgtaccacctccggctccaccacggcgagggtcctgccgtcccccagccgttccgtgtccagccagcgcgcgaggcgggcgcacagctgccgcacggactccccgccgtgcggtgcggcgcctggatcggccagccagcccgccaccgcttcgggctcggcggcgctcacctcgtccagggtccgcccccgccatctgcccatgtccaggcccgcgagttccgggtccgccgcggcgtcgaggccgagcgccgcggccgtctcacgacagcgcacgccgggggaggcgacgacacggacggcggcgggcagggtcccggccgtcgctctcgcccgcgccgccgcgtcggcctcgatcgagtcgccgtcgtcgaagcgtgcacgccgcagcgacggtgtgatcgccgctgagacgaaggtgacacgactggtcacgcggttgttcctcctgctggtgccgcgggccggctcactgcgcgccgaacgcccgcaggatgcgttccgcggccagggtggccgtcaacgagccgtccctgacctgttgttcgagcgcgggggcggcctcgcggaccgcggggtccgcgtgcagtcggcccagcagttcgtcgcggaccatcgaccaggtccagccgacctgctggtcccgccgcttggcggtgagccgcccggtggagtcgagcagtgtgcggtgctgttccaggcgctcccacaccacgtcgaggccgatcgactcacgggcactgcaactgagcaccggcggagcccagaacacgtccttgccgtgcatcagcctgagcgcgcccgccagctcccgtgcggccgcccgcgcgtcgcgctcgtgcgggccgtccgccttgttgacggcgatcacgtcggccagctccaggacacccttcttgatgccctgcaactggtcgccggtgcgggccagggtcagcagcaggaaggagtcgaccatgtcggcaacggcggtctcggactggccgacgccgacggtctcgacgaggatcacgtcgtagcccgccgcctccatgaccaccatcgactcgcgcgtcgccttcgcgaccccgcccagcgtgcccgcgctgggggagggccgtacgaaggcgttcgggtccaccgccaggcgttccatccgggtcttgtcgcccaggatggaaccgccggtgcgtgtggaggacgggtccacggcgagtacggccacccggtggcccagcgaggtcagcagcgtgccgaacgcgtcgatgaacgtcgacttgcccacgcccggcaccccgctgatgccgatccgccgcgcccggccgctgtgcgggagcagctcggtgagcaactcctgcgccagcgcccggtgctgggggcgggtggactcgacgagtgtgatggcgcgggccaccagggcccgcttcccgtcgagcacacccttcacatatgtgtcgagatcgatcgctgccatcggccgctacagatcgtggccgaggtcggccgcgagtcgtcgcaccaggtcgtacgccgcgtccgggatcaccgtcccgggcccgaacacggccaccgcgcccatctccagcagcgtcggcacgtcctgcggcgggatcacgccgccgaccacgatcatgatgtcctcccggccctcctcggcgagcttctcgcgcagcgccgggacgagggtgaggtgaccggcggccagcgaggacaccccgaccacgtggacgtccgcctcgacggcctgccgggcgacctcctccggggtctggaacagcgggccgacgtcgacgtcgaaaccgaggtcggcgaagccggtcgcgatcaccttctggccgcggtcgtggccgtcctggcccatcttggcgaccaggatgcgcggccggcggccctcggcctcctcgaacgcgtccaccagggcacgggtgcggtccacggacggggactcgcctgcttcgttgcggtacacgccggagatcgtacggatctggctcgcgtgccggccgtacaccttctccagggcgtcggagatctcaccgacggtcgccttcgcacgggccgcgcgcacggccagctccagcaggttcccgtcgccgtcggcggcccgggtcagcgcgtcgagcgcgtcccggcactcggtctcgtcccgctccgcgcgcagccgccgcagcttctcgatctgctgggcgcgcaccgaggagttgtcgaccttgaggacctcgatctgctcgtcgctgtccacccggtacttgttgacgccgatcaccggctgccgcccggagtcgatgcgggcctgggtgcgggccgccgcctcctccacgcgcagcttcgggatgcccgcgtcgatggcctgcgccatgccgccggcctgctcgacctcctggatgtgtgcccaggccttccgggcgaggtcgtacgtgagccgctccacgtaggcgctgccgccccacgggtcgatgacccgggtggtgcccgactcctgctggatgagcagctgggtgttgcgggcgatgcgcgccgagaagtcggtgggcagcgcgagggcctcgtccagggcgttggtgtgcagcgactgggtgtggccctgcgtcgccgccatcgcctccacgcacgtgcgcgtgacgttgttgaacacgtcctgcgcggtcagcgaccagcccgaggtctgcgaatgggtgcgcagggacagcgacttggtgttcttcgggtcgaactgcgagaccagcttggcccacagcagccgggccgcccgcagcttggcgacctccatgaagaagttcatgccgatcgcccagaagaacgacagccgcggcgcgaacgcgtccacgtccaggcccgcctcgcgcccggcgcggatgtactcgacaccgtccgcgagggtgtaggccagctccaggtcggccgtggcaccggcctcctggatgtggtagccggagatggagatggagttgtagcggggcatccgctgcgaggtgaaggcgaagatgtcggagatgatccgcatcgacggcttcggcggatagatgtaggtgttgcggaccatgaactccttcagaatgtcgttctgaatggtcccggccagcttctcgggcggtacgccctgctcctccgcagccacgatgtacagcgccagcaccggcagcacggcgccgttcatcgtcatcgacacggtcatcctgtccagcgggatcccgtcgaacagctgccgcatgtcgtagatggagtcgatcgccacgcccgccatgccgacgtcgccggtcacgcgcgggtggtcgctgtcgtagccgcggtgcgtgggcaggtcgaaggcgaccgacaggcccttctgacccgccgccaggttgcggcggtagaacgcgttggactcctcggcggtcgagaagcccgcgtactggcggatcgtccagggctggttgacgtacatcgtcgggtacgggccgcgcagatacggcgtcatgcccgggtaggtgccgaggaagtccaggccctccaggtcacggccggtgtacagcggcttgaccccgatgccctccggggtctcccacaccggtgcctcgccaccggtcctgtgcttgacggccgtacgccagtccgcgtcaccgccctcggcgaccggggtccccagctcgatgccggagaagtcggggattcccatcaggacactcccatgcggtcgagggtcgcggagaggacgtccacggcgtcacagcccgcgaagacgtacgagtcgatgccggagtagtccccgcggcccgcgaggaacacctgccgggccccggccgcgcgcagcgactcggcgctctgggcggcctgttcggcgtagagggcgtcgctggagcacagcacggcctcggtggcgccgctgtcctcgaagcggccctcggtgaccggctcgatgccgcccgcctggaacaggttggcggcgaacgtcgcccgcgcggtgtacgcggcggccgggccgagcgtcgccaggaagatccggggccgggagccggtcgccgccagatgggcgtcggagcgggcgcggagggcctcgtacgcctcgtcccggcgcacccggggcagtccgccggacggcggctcgggcgccgcctcgcgctccaccggcttctcggcgagcagcgggaactcgctcacgccggtgatgggttcgcgccgcttggcgagcttcttggagcgctcggcccaggtcgtcgccaggtccgtacggatccgcccggagcgcagcacggccgcctggccgccgtcgcgctcgatggtccggaagaactcccaggcggcctgggcgagttcgtcggtgagccgttcgacgtaccaggagccgcccgcggggtcgatgacccgggccaggtgggactcctcgacgaggatcgtggaggtgttgcgggcgatacggcgggagaacgcgtccggcagcccgagtgcgtggtcgaagggcagcacggtgaccgagtcggcgccgccgaccccggcggccagcgtcgcgaccgtcgtgcggagcatgttcacccacgggtcgcggcgggtcatcatcaccggcgaggtcaccgcgtgctgcacctgcgcgcccgcgccgggcgccccggacacctcggcgacccgcgcccacaggcggcgtgccgcgcgcagcttggcgatggtcaggaactggtcggcggtggccgcgtagcggaactccagctgggcgcaggccgcttcgaccgtgaggccggcctcggtcagctcgcgcaggtaggccacaccggtggcgagggaggcgccgagttcctgcgcggccgagccgcccgcctcgtggtacggcagcgcgtccacggtcagcgcgcgcaggcccgggtagcgctcggcacagcgtgcggcgagcgcggcgacgggcgcgaagtccagcggggtgccggtgcgggcctcgtgaccgagcgggtccgcgcccaggttgccgcgcacggccttcgggtcgatgctcctgtcctcgtacagccgcagcagctcggccgcggcggcctcgacgtcacggccggcgtccaggaccaccggggccaggtcgagatagacgccgtcgagggcgcgcgcgatgccggacaccgggatgccgccctggcccacgagcagccagagcgaggtgacgccgttctccaggtcggcgaggacggcgccgtcgaccggtgccgcgtgccgctgccgtacgtcccagccgcccgtggtgttgccctcggggcggccgccgcgcacgaacggggcgaagcccggcagaccggggtcgggcgcgccgtcgcgcgctgtgtacaggggccgggtgcgcagcccgtcctcgagcgtggtggacagggcgtcctcagctgccgtacccgagacttccttgcccgacttgcgcagcacaccctcgaccaggcgttgccactgctcgtgtgtcgcgtcagggaactcggcggccagtgagagcccgtcgtcaggcaggaccgtcatggctcggatgctagggcagcagcgttgactcagagcagagccaggcttgtgacgtttccctc

SEQ ID NO: 2 - DNA, 4125 bp, Streptomyces griseochromogenes
atcccgttgtcgttcgcgcagcgtcgactgtggttcgtggaccggttcgaaggtccttcgccggcctacaacggccctctcgccctgcggctgaccggtgagctgaacgtaggcgcacttcaggcggcggtcggcgacctcatcgaccggcacgaagccctccgcacggtcatcgtcgaggacgacgacggcgtcccgcaccagcgggtgctgccctccggtcagaagcggttcggcctgcgggtcgtcgaggccgcgacggaggaggagcgggcggcggcggtcgacgaggcggccaccgggaccttcgacctggccgccgacgtgccgatccgcgccaggctggtgcggcgcggaccgcgcgagcacaccctggtgctggtgatgcaccacatcgccgtggacggggagtccttcggaccgctgtgccgcgatctcatcaccgcctacacggcccgccaggagggcagggctccggcgtgggagccgctcccggtgcagtacgcggactacacgctgtggcagcgggacgtactcggggacgaagccgatccgcacagcctggcggccaggcaactggagtactggcggcggacgttggccgacctggcgcagccgctggcgttccccaccgatcgcccgcgcccgaagacgatgagccaccacggcgacatggtcccgttctcgatcgaccccggcctgctccggtccgtggagaagctcgccgcgcaggcggacaccacggtctcgatggtcatgcagtccgccctggcggtcctcctgcaccacctcggctgcggtgacgacgtgcccatcggcgcaccgatcgcgggtcgcaccgacgaggaactgcgcgagctcgtcgggttcttcgtcaacacctgggtgctgcgcgtcgacctctccgggaacccgaccttccgcgagctgctccagcgggtgcgggagcgggccctcgccgcgtacgacaaccaggacatgccgttcgagcggctggtggagctgctgaacccggaccggtccaccgcctacaaccccctcttccaggtgatgctcgcctggcagccccccataccggaaccggagttccccggcctcgacgtccagtccgagcggctcgagaccgcaacagccaagttcgacctgttcttcgacctgatcccgcacggttcgggcggggcgcggtgccgtctggagtaccgcaccgacctgttcgacagggacaccgtcgagggcatcgcgaaccgcttcgtccgtgtgctgggccggctcgtggccgacgcggaacgcaggatcggcggcatcgacgtactcgacgcggccgagcggggccggctgctcacccagttcaacgacaccgccacggcggtgcccgagctgacggttccggagctgttcgaaagccaggtcgccaggacgccggacgcaccggccgtcgtgtgcgacgaccgcacgctgacctaccgggagctggacgagcgggcagacggcgtcgctcgggagctggtgcgccggggtgccgggccggaggacctggtggtcctcgcgctgccgcgcacggaggacctggtggccgggctgctcggcatcctcaagtccggtgccgggtacctgccgatggacccgcagtacctcgccgggcgggccgagagcgtgctggccgaagcacgcccgcgcttcgtggtcaccgacaccaagacgtcgcaggacctgccgccgaacgacatgtcgagcatctacctcgatgaccgcgcgcagtgggacgcgcccgtgaagacgccggacgacgggggccggatctcgccgccgcgcccggacaacctggcgtacgtgatgtacacctccggctccacgggcaagcccaagggcgcggcgatcacccaccgcaacgtcgtcaacggagtgcgggaactgagtcgcgtcctggacgcgccgcccggctggcggatgctggccggcacctcggtgaacttcgacgtctcggtcttcgagctgctgaccaccctgtccaccggcggcaccgccgaggtggtgccgaacgcgctggcgctcggcgagcgggactcctgggacggccatgtgatcagcgcggtgccctcggtgctcggggaactggtcggccacctggagaagacgacggacgtgcgcacggtcgtgttcgcgggcgatgtccttccggcccggctggtgcggcaggtgcgcgaggccctgcccggcgtgcaggtggtgaactcctacggacagagcgagagcttctacgccaccacgttcgcccttccggcgtccgaggagtgggcggagagcgaggtcgcgccgatcggcacgccactgggcaacatgcgggcctacgtgctcggcccgggactcgccccggtgccgcagggcgcggtcggcgagctgtatgtggtggggacctgcctcggccgcggctaccacggccgcccgggcctgaccgctgagcgctacgtggcgaacccgttcggccccgcgggcgagcggatgtaccgcacgggcgacctggcgcgctggaacgcgcgtggccggctggagtgcctcggccgcggcgacggccaggtgaaggtgcgcggcttccgtatcgagacggccgaggtcgaagccgcgctcaccgcgcaccccgggatcagcgaggccgtggtgatcagccgcgacgtgtccccgggcgggcggcggctcgtcgcgtacgtggtgcacgccggcgagggagccgtcggtgacgacggcgccggcggcatcggcgatgtggacgtgctggccggtgcctcggccgccgagctgcgcacgttcgtcgcggcccggctgcccgactacatggtgccgtcggccttcgtggccctcgaccggatgccgctcgggccgaccggcaagctggaccgctcggcactccccgagccggagttcgtgggcgagggctaccgggagccgcgtaccgaagccgaggcgatcatcaccgtcgcgtacgcggacgtgctcggtgtggagcgggtcggcatcgacgacgacttcttcgcggtgggcggggacagcctgcgctcgatccaggtggtggcgcgggcccgggcccgcggcctggacctcaccacgcgggagatcttcgagtgccgcacggcggcccgcctcgccgaggtggcctccgcccgccaggaccgggcgcccgcgctcgcggagctcgagggcggcggcgtcgggccgatgccgttgcagccggtggcgcggcaggtgttcgagcacggcggcgggatgaaccgcttcgccatgtcgatggtgctcgagctgcccgcgggcatcgacgagcgtggcctcgccgcgacgctggacgccgtgctcgaccggcacgacctgctgcgcgcgcggctggtgcgcggtgacgagttctccctcgtcgcacagccccagggctcggtgcgggcggcggacctgatccgccgggtcggctgcgacggccggtgggacgacccgtcctcgctggaggcggcgaaggcggagctggacgacgctgtcgggcggctcgacccggaagccgggaccatggcggacttcgtctggttcgcccccgaggcggggacgggccggctgctcgtggtcctgcaccacctggtggtggacggcgtgtcctggcgcatcctcatgtcggacttcgccgaggcgtggcagcaggtccgggccggcaggacgcccgagctgcccgccgtcggcacctcggcccgccgctgggcgtcggccctggaggacgaggcgctctccgcggagcgggaagcggaactggcgtactggcgcgacctgctggaggtgcccgaccccgcactgggcacgcgggtgttcgacccggcggtggatgtgatgtccacggtcgacaccgtgcgggtgcaggtgcccgccgacgtcaccgaggcggtcctgaccaggcttcccgcggcgttcaagggcaccgggaccgatgtgctgctcgccgcgctcgccctggcggtcaaccggtggcgcggtgcggaccgttcggccctggtccgtctggagggccatgggcgtgaggaggacgtcgtccccggggccgacctctcccggaccgtcgggtggttcaccagcatgtacccggtccgggtcgacgtg

SEQ ID NO: 3 - DNA, 3039 bp, Streptomyces griseochromogenes
gaggtgtggccgcaggcaccggggcagtccgggatccagttcgaggccgcgctcgccgacggctccttcgacgtctaccacatgcagttcgtgctccacctgtccgggcacgtggacccggagcgcatgcggtcggccgggcaggcgctcctcgaccgctatccgaacctgcgttccgcgttcctcgccgcggccggcggcgacccggtgcaggtcgtggcggaccacgtcgccctgccctggcggcacatcgatctgaccggtcgcgccgcggccgagcaggacgcggcgctcgaccaggccctcgccgacgaccgggccgaccggctcgaccccggcaagccgccgctgatgcgcctggccctgctcacctgcgggccgcggcaggcgaaactcatcatcacggcgcatcacaccctgttcgacggctggtcctcgccgttggtgatcaaggatctgatccggctgtactccacggccggcgggctcggcccggtccgcggctacggggactatctgacctggctgtccacgcgggaccggaaggcgtcggccgcccagtgggccgccgagctcaccggattcgaccagccgaccctcgtggcgccgaacgctcccgtccaggaagccgcgtccgccctcgggcgggtcgaggtaccgctgtcgatcgacaaggggcgcgaactcgcccggcgcgccgcggaactcggcgtcacgctgaacacgctcctgcagggcgcgtggggaatcctgctctcgaagctgaccgggcggcaggacgtggtgttcggagccgccgtcaacggtcgtccggccgagctggccggttcggacgagatggtgggcctgttcatcaacaccctgccgaccagggcgtcgtgccgaccggaccacagcgtcgcgcaggtcatcaccgatctgcagaaccggcagaccgcgctgctcgaccaccactactacgggctcgccgacatccagcgcgacgtcgggctgcccgccctgttcgacacgatcgtcgtgttcgagaactacccgatcgaccgtgcgggcatcgtcgacgcgaacaccgcggcgggattcacgatcgacgccatccggccgttcgcgggctcgcactacccgctcaccctcaacgcctccgacccctacctgcggacctccctcgactatcagaacaacctctacgaccgcgaggcggccgagctgatcgccgcccggctcgtccgggtcctcgaccaggtgctcgacgacccgacggtgccggtcggagccgtcgaggtgctgtcgcgggaggagtgggaccggctggtgcgccgggtcaacgacacggcgcggccggtggccgcggatacgctgccgggcgcgttcgaggcccaggtggcacgggaccccgaccgtgtcgcgttgatcggcgagcgggagaggctgacgtacggggagttcgaccggcgagccaatcagctggcgcactggctggtcgaacagggcgcgggacccgagcagttggtcgcggtgcgcatcccgcgttccgtcgacctgatggtggcgatctacgcggtggtcaaggcgggcgcggcctatgtgccgctggacaccgagctgcccgaggaccgggtgcggcatgtgctggacagcgccgagccgctgctggtgctcgacgggacgcttccggacgtgtccgcgtacccgaccacgaaccccgagcgggtgctgtcgccggacaacgccgcgtacgtcatcttcacctccggctcgaccggcggcccgaagggcgtgcaggtgtcgcaccgatcgatcatgaaccggttgaagtggggcctggcgcacttcgacgtcggcaccgaggaccgggtgctgctgagcacatcggcgagcttcgacgtgtcggtgccggagctgttcgcgccgttgcaggtgggcgccgccgtggtgatcgcgcgtccggacgggcggcgggatccgtcctatctggccgagctgatccggcgggagcgggtgaccggcgcggacttcgtgccctccctgctggaggcgttcgccggcgagcccgcggcgaagcggtgcgacagcctgcgctggatcgaggtcgcgggtgaggcgttcccggcggcgctggcgaacaaggtcgtcgatctgctgccggactgcggtgtgcacaacctctacgggcccaccgaggcggcggtggaggtcacggcgtggcagcacgtgccgggggcggaccgggtgccgatcggcgcgccggtctggaacacccaggtgtacgtgctggacgcggcgctgcgcccggtcgcgccgggagtggcgggcgagttgtacctcgccggtgccggcctcgcgcggggctacctcggccggagcgcgctgaccgcgaaccggttcgtcgcctgccccttcggccccgccggggcgcggatgtaccgcaccggagacctggtgcgctggaacgaggacggccaggtcgagtacatcggccgcaccgacttccaggtcaaggtccgcggattccgcatcgagctgagcgaggtggagtcggcgctgaccgcgcacccggacgtcgacaacgcggtggtcgtggtacgcgaggaccgcgccgacgaccagcggctggtcgcgtacgtggtgccgggaggcggcagggcggatccgtccgggctggatctcgcggccctgacggatctggtccgtgggcgtctgccggagtacatggtcccctcggcgatcgtgccgctcgccgcgttccccacgacagcgagcgggaagctcgaccgcaaggcgctccccgcccctgaccacaccgaagccacggccggacgagggccgcgcaaccaccacgaggaagtcctctgccggctgttcgccgagctgctcggcgtggaggagatcggcatcgacgtcgacttcttcgaccacggagggcattcgctgctggccacccggctgatcgggcgcatacgcagcgagttcgacgccgacgtgaaggtcacgacggtgttccgccatccgaccgtcgcccagctggccgagcagatccagaag

SEQ ID NO: 4 - DNA, 5253 bp, Streptomyces griseochromogenes
atcccgttgtcctttgcccagagccggatgtggatcctccacaagctggaaggcccgtccgcgacctacaacgtgccgttcgtgctgcgcctggaaggggtactggacacgacggccctggccacggcggtgacggacgtcacgaaccggcacgagagcctgcgcaccctggtcgtcgaggacgcgggcggcacggcgtcgcagcggatcgtgactcctgaggaggcggtcttccccttccgtgtggtcgacgtggccgcggacgcggtggacgcggcgatgcacgaggtcgcgtgcgagccgttcgacctggacacggagctgcccctgcggacgaccgtgctgcggatcgctccgcaggagcacgtcctggtgttcgtgttccaccacatagccgcggacggggcgtcggtggcgcccttcgtcagggacctggtgtcggcgtacacggcccgccatcgcggcagtgcaccgcagtggacgccgctgcccgtgcagtacaaggactacacgctgtggcagcggcagctcctgggtgacgaaaccgacccggagagcaccgcggcggagcagatcgcctactggaagaaagaactggccgaggtgccgcagccgctgcagctcccgctggacaggccacggccgacggcggccagccaccgcggcggcgaggtccccttcgtgctggcaccggagctgctgtccggggtgcagaagctcgccgcggaccatggtgccacggcgccgatggtggctcaggctgcgctggcggtgctgctgcacaagctgggtgcgggggaggacgtgccgatcggcagtccgatcgaagggcgcggggatgagcaactcgacgatctgatcgggttcttcgtcaacacctgggtgctgcgcgccgatctgtcgaggaacccgtcgttcgccgatctgctggagcaggtgcgggacaaggccctcgccgcgtacgacaaccaggacataccgttcgagcggctggtggagctgctcaacccggaccgcaccaccgcttacatgccgttgttccagacggcgctgggctggcagttcgtgtggggcgagatcgagatgccgggcctgcgggtcacccccatccccgtgggcaccggcaccgcgaagttcgacctgctcttcaacatcgtcccgaacgcgtccgggggcacgcgcggcctgctggagtacgcgacggatttgttcgaccacaccacggccgaacgcatcgtcgaccggttcgtgcgcatcctggagcaggtgctcgaggacccggcggtgccggtcggcgccatcgaggtgctgtcggcgcaggagcaggactggttgctccggggagccactgacacggcgctgtcggtgccggagcgaaccgtcgacgcgctcttctccgagcgggccgccgcgacgccggacgcggtggcgttggtgtgcggggacgtgacgctgacgtatcgggaggtggacgagcgagccaaccggctggctcgggtgctgaccgaacggggtgtggagccggagtcggtggtcgcggtggtggtgtcccgatcgccgcagtgggtggtcgcgctcttgggagtgatgaaggcgggcggggcgtatctgccggtggatccggcctatccggcggagcgcgtggcgttcatggtggcggattccggcgcggtgctggtgatcggggacgcggtctcggcgggacaggtgccggagttgtccgcgcccatgatccgcctggacgatccggacgtggtcgcggcgctggccggcgccgacccgggccccgtgaccgacgccgaccggcgcggtccggtggcggtggccaatacggcgtacgtcatctacacctcgggttcgaccgggacgccgaagggagtggcggtcagtcactcgggggtggccagcttggccgcgtcgcaggcggagcggctcgcggtgacgccggacagccgggtgttgcagttcgcctcgccgagcttcgacgcctcgctgtgggagtggagcatggcgctgctgacgggggccgcgctggtgctggccggcccggacgagctggccgcgggtgacccgctgatcgagacgatcgccgcccacggggtgacgcacgcgacgttgccgccggtggtgctggcggcgttgccgacgggggcgttgccgagtgtggagacgctggtggtcggaggttcggcgtcctcgccggaactggtggcccagtggtcggccgggcggcggatgatcaacggctacggcccgacggagatcaccgtgtgcgccgccatgagcacggcgatggtgggtgacggccgtactccgccgatcggccggccgatcgccaacacccaggcgtatgtgctggacacggcgctgcgcccggtcgcgcccggggtcgccggtgagctctacatcgccggcccggggctcgcccggggctacctcgggcggacgggcctgaccgcggaccggttcgtcgcctgccccttcggcgcgccgggcacccggatgtaccgctccggggacctggtgcgctggaaccaggacggcgagctcgagtacctcgggcgaaccgacttccaggtcaagatccggggtttccggatcgagctgggcgagatcgagcacgcgctgacgatgcaccccggtgtggcgcaggcggcggtcgtggtgaatgagaaccagctgggcgacaagcagcttgtggggtacctggtgcccaagccgtacgccgccgcggtggctggtgccgacgctcaggtggatgagtggcgccacctctacgacgacagttatgccgattccagcgatgaggagttgggcgaggacttccaagggtggaactccagctacaccggtgagccgatcccgcgtgagcagatgctggagtggcaggacgcggcggtggcacaggtgttgcggttcgagccgcggcgggtgctggagatcggtgtgggttccggtctgcttctggcgaagatcgtcgacgaggtcgaggagtactggggcaccgacatctcggccacggtggtggaccgggtccgggcgcaggccgcagaggccggatacggtgacagggtccgggtgagcgcccaaccggccgacgacatgtccgggctgcctcgcggccggttcgacaccgtggtgctcaactcggtggtgcagtacttcccgagcgtcgagtacctggaccaggtgctgcgccaggtgatggaactcctcgtggcgggcggccgcgtcatcgtcggtgacgtccgcaacgccgcgacacgcaccctcatgcagacggcggtgcagcgtacggcacacccgcacgcctcgcacgacgagttgcggacgctggtgaagagggagctgctcgccgagcgggaactggccatcgccccggagtggttcaccgagtgggcgggagacgactccgtcgcggtcgacatccggctgaagcccgggcaggcgcacaacgagctgacccggcaccgctatgaggtcgtcctgtacaagcgaccggctgacgtactcgacctggccggtgtgccgtcggtgccgtggggccgggaagtgcacgaccttgccgatctcggccgttgtgcggaccgggcgggcggtccggtgcgggtgaccgggatacccaacgcgcgtctggccgaggaggccgcactgacggtcgcgacgggtctcctcgacccggcgccccgctccggtgaaccggtcgatccgcaggaactgctccagtgggcacgcaaggacgatcgggacgtggttctcacctggtcgggggaggacacgcggtgcttcgacgcggtgctgctgcccgagcggcggaccgggcagccacatgtctcgggctcgttcgttccgagcggtgcgggcgggcgggtccgggcgaacaaccccgcgctggccaggtcgatcggtccgttgctcatcgagctgcccgagtacctgcgtgagcgtctgccggactacatggtccctcccgcgctcgtgccgctttcggagctgccgctgactccgaacgggaaactgaaccaccgggcgctgcccgcgccggactacgggcaggcagcgaccggtcgggcaccgcgcaatcaggtcgaggagaccctcagcgcgctgttcgccgaagtgctcggcgtggacaacgtcggcatcgacaacgacttcttcgccaccggcggggacagcattcgctccatccagatcgtcgcgcgggccagggcgcgtggcatcgaggtgagcacgcgggagatcttcgagcaccgtacggtcgcccggctcgcggacctggtcgaaggacgcgaggaagaacgcctcaccctggccgagctaccgggtggcggcgtgggatgggctccgctgatgccgacggcgaagcacgtgctcgcgctcggtggcggccttggccggctctgcatgtccatgatgttgaccctgcccgaaggcatcgaccgcgccggactggtggcgacggtgcagaccgttctcgaccggcacgacgtgctgcgttcccgactcgaccggacgcggcagggcctgtcgatcgagccggccggcagcgtggacgccggcgcgctgctgcgggaagtgcgctacggcgacgccgacgcgcacgccgagctggacgcggccgcggaccggctggacccggacgcgggcgtcatggcgcagttcgtgtggttcacctcggacacggacacggacgcggaccggttgctgatcgtgctgcaccacctggtcgtcgacggggtgtcgtggcggctcctcctgcccgacctggtctcggcctggaagcaggtccgggacggccgcaccccggaaccggcagggccgggcacctcgttgcgccggtgggcgcatgccctggccgacgaggcggcccgtcccgagcgggtggcggagctgcccgtgtggcggcagatcctgcgtggggacgagccggtactcggagcacgggagctggacccggcgcgcgatgtcgccgccaccgtggaaacggtgcgcgtccacgtgccggcggatgtcaccgagaccgtgctgaccaaggtgcccgcggtcttccggggcggtgtcgacgacgggctgctggcggcgctggcactggcgctgacccgctggcgtcggactcggggcgttcccgcttcgtcggctctggtccggctggaagggcacggccgggaagaggaggcggtgcccggcgcggatctgtcgcgcacgatcggttggttcaccacgatgtatccggtgcgccttgacctggcc

SEQ ID NO: 5 - DNA, 3096 bp, Streptomyces griseochromogenes
ctggccgaggtgtggccggtgacctcggcgcagtccgggatcctcttccattcgatgctggccggatcctcgttcgacgcctaccacgtgcaactggtgttccacatctccggtgacgtcgaccccgagcggatgagccgggccgggcagatgctgctcgagcgccacaccagcctccgtgcggcgttcgtcgacggggccgacggcgatctcgtgcaggtggtgccggcggcgggggtgaccctgccgtggcggtacctcgacctgaccgggtacggcgaggcggagcggaccgagacgttcgagcgcttcctcgcccaggaccaggccgcccacttcgacgtgggcaccccaccgctgatccggctggcactcgtcgccctcgagcccggccgggccgaactcgtgatgaccgtccatcactcgctggccgacggctggtcctcgcccttgctgctgcaggacctgctgctgctctacgcatcccacggcgacgcggccggtctgcccggcacgcggagctacggtgagttcctggcctggcgcgcacggcaggaccaggacgaggcggcacgggcgtgggcggccgagctcgacggggtcgatgaaccgaccctgctcgctccgggagccacgggcggcgacggactcgaccaggtcgaggtcgccctcccgctggacctgtccggcgaactcaaccggtgtgcctccgtgttgggcgtcaccatcaacaccttggtccagggcgcctgggcgctgctgctcggtcagctcaccggccgccaggacctggtgttcggcgccaccgtctccggtcgtccgcccgccgtgacggacgtcgagacgatggtcgggatgttcatcaacaccctgcccgtacgcgtggagtacgcgcccggcgacaccctcgccgaggtcctcacccggctgcagagccggcaggccggcctggtggagcaccactactacgggctcacggagatccagcagtccgtcggcctgcagaacctcttcgacacgctggtcgtcttcgagtcgtacccggtcgaccgggacggcctcagctccgccaccgacgccgcggacgggatcgccatcaccggtctgcgcccgtccaacggcacccactacccactggctctgatggcggcggtcgacacgcacctccagttcctcctccagtacacgcccggtgtcttcgaccgggacacggtggaggcgtacgcggcccgattcgtgcgcatcctggaacagctggcggccacccccgaactgaagaccgcgcagctcgatgtcctggagccggccgaacgcgaccgactcctcgtcgagttcaacgacacggccgtcccgactccggacgtctcggtcaacgcgctcgtcgaggcacaggcggcgcggaccccggacgaggtcgccgtggtcgccgagggcgagtcgctcacgtaccgcgaggtgaatgcccgggccgaccgcctggcgtgcgaactggccgcccgcggggtgggcccggagtcgatggtcgcggtgtcgctgccgcggtcggcggacctggtggtcgccctgctcgcggttttgaaggcgggcggcacgcatctgccggtcgatcccaggtaccccagccaccgcctcgcggccatcttcgaggaggcgcggccgcacctcgtgctgacggaccaggcgacggtcggcgtgctgccggagcacgacgccccggatgtcctcctcggctcactcgacctgtccggagacgtcaccggtctcgaaatcccgtcccacgcggatcagttggcgtacgtgatgtacacctccggctccacgggcaagcccaagggcgtcgccatcacccacggatgcgtggtcaacgccgtgctgcggctcgcccccatcgtcggcatggagccgggcaagcggctcctcgcggccgcgtcggtcaacttcgacatctcggtgttcgagatcttcacgaccctcgccaccggcggcgtggtcgacgtggtccaggacgtgctggtcctgggcgaccggaagggctggagcggcagcgtcatccacaccgtgccgtccgccttcgccgaactcgtcgacgacatcgccgaccgcaccagcgtggaaacgctcgtcttcgccggcgaggccctgccctcgtcgctcgtcgagaagacgcgggatgccttcccgggcgtacggatcgtcaacgcctacgggcagaccgagtcgttctacgccaccaccttcaccgtcgacggtgagaggccggtctcggcgggcagcgcgcccgccggcgccccgctgggcaacaatcgggcctacgtcctcggccccggcctgactccggtgccgccgggcgcggtcggcgagatatacatcggcgggaacgtggcccgcggctaccacggccgcgccgcgctgaccgccgagcgcttcgtccccgacccgttcggcccgaccggtgcgcgcatgtaccgcaccggtgacctgggccgtttcaatggcgagggccagctggagtacgtgggccgcggggacgcgcaggtcaaggtgcgcggcttccgcgtcgagcccgccgaggtcgaggccgcgctcagcgcgcaccccggcgtcgcgcagaccgccgtcatcgcccgcgacggccgcagcaccggcaagcaactggtcgcgtatgtcgtgcccgccgtcaccggcgacagtacgacgaccggtgaccctcgtggcccggagacgaaggagctgcacgacttcgtcgcggagcggctgccggacttcatggtgccgtccgccttcgtggtcctcgaccggctgccgctcgcgacgaacggcaagctggaccgggccgcgctgcccgagccggagtacaccggcgccgcctaccgggcgccccgcaccgcccgtgaggagtccctggccgcgctgttcgccgaggtgctcggcgtggaccgggtcggcatcgacgacggtttcttcgagctcggcgggcactccctgctcgccacccggctgatcagccgggcccgcgccgagatggggatagagatacccatccgcaagatcttcgacctgccgacggtggccgcgctcgccgcgtggtcggaggaa

SEQ ID NO: 6 - DNA, 3792 bp, Streptomyces griseochromogenes
attccgctgtcattcgcacaacgccgtatgtggattctgcaccagatggagggcgggtcggagaactggaacatgccggcggccttccggctgaccggtgccctggaccaggccgccctcaccgcggcgatccgcgacgtggtcgaccggcacgagaccctgcgcaccgtctacgagacgaacgacgacggtgagctgtaccagcggatcctcccgacagcggaggccacgcctgaggtgccggtcatcgaggtggcgcccggggacgtgtccggcacgatcgaggaggccttcgggtaccggttcgacctggcggccgaacccccgctgcaggtacgcctgttccgctgctcaccccaggagcacgtcctggtcctggtcatccaccacatcgccacggacggcagctcggtcgcgcccctggtgcgggacctggccgcggcctacaccgcccgccgggacggccgggcgccggcgtgggagccgttgcccgtgcagtacaaggactacacgatgtggcagcgtgagctgctcggcgacgtggcggacccggacagtctcgccgcggcgcaggtcgcgtactggcgcaaggaactggccggggtgccgcagccgctgaacctgccgctggaccgcccgcggcccgtccaggcgagcgggcgcggctccacggtcggcctcatggtggagccggaggtggcgagcgggctgcagaagctggccgacgagcgcggggcgaccatgtcgatggtcctgcacgccgcactggcggtgctgctgcgcaagctcggcggcggggacgacgtgacgatcggcagctcgatcgccgggcggaccgaggaggcgctggccgatctggtcgggttcttcgtcaacacccaggtgctgcgggtggacctctgcggtgacccgtcgttcaccgatcttctcgcccaggtgcgacacaagtcgctggcggcctacgagcaccaggacgtgccgttcgacatgctggtcgaggcgatcaaccccgaacgctccgcggcctaccagccgctgttccaggtgatgctcggcctgcagaactacgagaggccggaactcgaactcgccggactcacgttggaggtcgagcagaccatcccctcgacctccaaggtcgacctgttcttcaacatgatcgtggacgactcgggggcgctgcggggcgacatctcctacgcgacggacgtgttcgaccgggagacggtcgaagccttcggggctcggttcgtgcgtgtcctggagcaactggtcggcgatccgggtatgtgcgtcggggatgtcgacgtgctgagcccgggggagcggcagcggctggtggtggaggtgaacgacaccgccgagccgaccctggagctggtggaggcggtgcgcaggcaggtgagggcgacaccggaggctctcgccgtcatcggcgaggaggagtcactcacctaccaggagctggaagcgcggtcgaacaggctggcgcactggctggccgacctcggtgtgcgggcggagtcgcgggtcgccgtgtgcctgccccggaccgtgaacctggtggtggcgctgcttgcggtgatcaaggccggtggagcctacgttccgatcgatccggaacacccgcgttcccggatcgactacatcctcgagcacgcggatccgctgctggtgctcgacgccgaggcgctggccggtgtggattggccggcgtatccggatgcggcaccggaggtggtcgtccggccggagaacgcccagtacgtgatctacacgtcggggtcgacgggcaagccgaagggcgtggcgatcccgcgcggcgcggtggcgaactacctggccacgacacagcggcggttcccgctgtcgtccgcggaccggatgctgttcagcacgacggtggccttcgacatggcgaacaccgagctgtacctcccgttcaccgccggcgcgaccatggtgatggcgggcaaggacaccgtcaccgacccgtcggccgtgctggagttgatacgccgccacggggtcaccgcggtgcaggccacgcccgccttctggcagatgctgttgatgcacgacccgaacgccgcgaagggtctgcggatcatcatcggcgcggaggccgtgccggtacgcctggccgagaccttggcgaagcaggccgccgaagtgttcaacatgtacggcccgaccgagacggtgacgtggtgcaccgaggcgcgcgtggaggtggggcagggtgcgccgatcgggaggccggtcgggaacacccaggtgtacgtgctcgactcgcggctgagcccggtttcgcgcggggtaccgggcgaactgtacatcgccggtgccgggatggcccgcgggtaccagggtcggccggagctgaccgcggagcggttcgtggcgtgcccgttcggtccggccggcgcgcggatgtaccgcaccggggacctcgtgcgctgggacgggaacggtcagctggagtacctcgagcgcacggacttccaggtgaagatccggggtttccggatcgagctcggggagatcgagcacgtgctgaccgggcatcccggcgtggcccaggcggcggccgtggtgcgggagaaccaggacggagacaagcgcatcgtgggttacgtgatacctgagcccgatgcctcgcaggccgacggcggtgtccaggcgctgctcgccgagctgcccgcctacctgcgggggcgtctgccggactacatgatgccctccacgctgatcccgctctcggaggtcccgctgaccccgaacgggaagctcgaccgcggagcactgccgtccgaggacatcaacgccgcggtcagtcgagagccgcgcaactcccacgaagagaggatgtgcgccctcttcggcgagctgctcggcatcgagcgggtcggtatcgacgacgacttcttcgagctgggcgggcactcgctcctggccacccggctcagcgctcgcatccgcggcgagttcgacatcgagatgcccctcaggacgatcatcaagtaccccacggcgggcgagttggccgcgctgttgctcgtcaccactcccgcggagtcctccgacccgctcgcggtcgtgctgccgttgaacagcgatcccggtacgggcaagccgccgctgtggttcttccacggaggaggcggcctcggctggacgtacttcagcttcgcgtcgtacgtgccggactggcccgcctatgccctgcaggcccgtggctccgacggcgtggacaagctggcggggtcggtgaaggagatggtcgaggactacgtcaccgagatgctgaagatccagccggaagggcccttccacctgatcggctggtcctacggcggcacggtcgtgcaggccgtcgcggaggcgctcgaccggcgtgggcacgagatcgccttcgtggccatcctggactcccagccgggtgggcacgggttcacggagatccatgccggcaaggccctgccggactaccggtccgaactcgaggaattcttcggccagtacatcggtaccgacaaccggcaagacttcctggacgccatggcgaaggtcctggccaacaaccacaccctcatgatggatttcgaatcgccggtctaccggggcgatgtgctgttcttcagcgcgacccttcaggaacgttcgtacgcgcatctgtggcggccctacgtcctcggttccatcgaggtgcacgacgtgcgtgccacgcaccacgaaatgaacatgcccgcggccgtggccgaggtcatggaggtcatcaagcgcaagctg

SEQ ID NO: 7 - DNA, 3231 bp, Streptomyces griseochromogenes
atgatctctgtgcgttcgttcggtgcgtcgtctgcgcacaaagggttgtggcgggcgcaggaaatgttccccgacacactgaaccatgcgctcaccctgtggaacgtggacggtgagctggacgcggccgtcatggaatccgcgttcctgcatgtgatgggcgaggcggaagtgctgcgcgtcaccttcgtcgacgacggcgacgggctgcgcctcgtgcccagggaactgggcgactggcggccgttcttcctggacaccggcgccgaggacgatccggagcaggcggcgcgcgaagcgctggccgacatggtgcggcagccgttcgacctggagcgggacctgctgttccggctgggcgtggtcagactcgcggcggcccgctccgtgctggtgatcatctaccaccacctcatatcggacgggttcggcgcggccggcctgctgtcgcggcgcctggccgaggtgtacacggcgctgtcgcggggtgcggacgtaccggagctgccgcacccgtgggatgccgagtcgttcgcgaccgaggcggcgcagtacagcgcctccgagcagttcgccgaggacacggagttctggcgcgactacctggcggacgcgcccgcccccgcccggattccgcgtgtcgccctgtccgacgcgatgcggtccgcgctctccgaaccgatgggcagcgccgaccgctggggggagttgaccgagcccatcggcatggtgagccgcacgctgaccgttccgcacgccgatgcgcaggcgtggaccgaggccgcgaagtccatgggcgtgtggatgtcgtcgatgctgaccgcggccgcggccgtgttcctccggcaccgctgcgaccgtccggagttcctcctctcgctggccgtggccaatcgggtcggggcggcgagcaggacgcccggtctggcggtgaacgtggtgccggtgcgggtgaaggttccgctcggtgcgaccttcaccgagatcgccgacgcgatcggcgacgagacgtacgagatcttcgatcacgcggcctgccactactcggaaatccagcgcgcgagcggaaccgtcctcaacgatcgcggcagtttcggcgccgtcgtcaacgtcgtcgagttcgcggaacgcctccgcttcgccgacagcccggcgcacttcctcggcgggacgaccgggaccttcgaagaactcgcgatcggcgtctacaccgacggaaccgccgacagcgacctgttcatccggctcgacgcccccgcgagcctgtactcccgcgcggagctccgtttcatcggcgaggacctgatcgcgcacatccgcgccgtggtggccgccgacgaacaaccggtcggcgcgctggacgtggtgagcggtgccgagcgggaccgggtgctcacggcgccgaacgacacgaatgtgccggtgccggggctgagggttccggagctgttcgcccgccaggtggaccgggctcccgacgccgtcgcggtggtgtccggggactcggcggtctcgtaccgggaactggacgagcgctccagccgcctggccggggcactgcgacagcggcaggtcggacccgagacggtcgtggcggtggcgctgccccgatcggtcgacctggtcgtcgctctgctgggtgtggtgaaggcgggcggagcctacctgccggtcgacccgacgttcccggcggcgcggatcgcgccggtggcccgcgacgcctcggtgcgcgcgttgctcaccgatatggcgacagccgaagcgctctccggcgatctggatgtgccggcgatcctgttcgacgacatccgcccggacaccgccgccgacagcgacgctgcgacggaggttccgctcccgtcgcgtcaggacggcctgctggccgtgatgtacggctccggaccgaccggtgcggccacaggagtcgccgtgacgcaccggaacatggagcggttcgccctggaccgccgctggcgggaaggcggccgagacaccgtgctgtggcatgcgccgcacacctccgacgcgcttcccctcgaagtgtgggtgcctttgctgaacggcggccgcgtggtcgtggcccctccgggggagctggacatcgacgcgctgaccgaggtgcgagcggcgcacgagatctccacggtgtggctgcccgcgggcctgttctcggcgatcgcggcagaacgccccgagcgtctggccgggttgcgcgaggtgtggaccggtggtgagcgtgtgtccgcggccgcggtgcgacgggtgcgggaggcctgccccgagctgacggtcgtcaccggccacggcccgacggaaacaaccgtgttcgccgcgtcccaccgcatggccgcggacgaaccggtgcaccacgcgggcgcggtcggccgcccgatggaccacacggccctctacgtgctggggccggggctggcgccggtccccgtgggcgtggccggagagctgtacgtggccgggcccggcgtgacgcgtggctgccccgggcgacccgggccgaccgcggagcggttcgtaccctgcccgttcggtccggccggcgcgcgcatgtaccggaccggagaccgggtgcggtggagtaccgacggcctcctcgagtacgtgggccgggccggcgcccgggccgacgtacgtggtacccgggtcgaactggccgaggtcgaggaagcgctgtccgaacacaccagccttgcacggtcggtggtggtcgtcagcgaggacacctccgggcagcagcgccttgtggcctatgtggttccggtgggcggccggaccgttgcgggtgacgaactgcgccggttcgccgcggggcggctgccggagttcatggtcccgtcggtgttcgtggtgatggaacgcctgccgctgaccgccggcggaagggtggaccggtattcgctgccggagcccacgttcgatgacgacaagtaccgggcaccgcgcgaccacaccgagcgggtgctggccgaggcgttcgccgacgtgctcgagctggaccgggtggggatcgacgacgacttcttcgaccacggcggcaactcgctgcgggcgatcagactgaccggcctgatccgggcggagctgaaccaagaggtgcccatccgcacgttgttcgcggcgcgcaccatcgccgggctgtccgactcgtggaaggagctcgcccggtccagcaggccgactctgcgcaggaggacgaaggaaggcgaagctctgtag

SEQ ID NO: 8 - protein, 1375 aa, Streptomyces griseochromogenes
IPLSFAQRRLWFVDRFEGPSPAYNGPLALRLTGELNVGALQAAVGDLIDRHEALRTVIVEDDDGVPHQRVLPSGQKRFGLRVVEAATEEERAAAVDEAATGTFDLAADVPIRARLVRRGPREHTLVLVMHHIAVDGESFGPLCRDLITAYTARQEGRAPAWEPLPVQYADYTLWQRDVLGDEADPHSLAARQLEYWRRTLADLAQPLAFPTDRPRPKTMSHHGDMVPFSIDPGLLRSVEKLAAQADTTVSMVMQSALAVLLHHLGCGDDVPIGAPIAGRTDEELRELVGFFVNTWVLRVDLSGNPTFRELLQRVRERALAAYDNQDMPFERLVELLNPDRSTAYNPLFQVMLAWQPPIPEPEFPGLDVQSERLETATAKFDLFFDLIPHGSGGARCRLEYRTDLFDRDTVEGIANRFVRVLGRLVADAERRIGGIDVLDAAERGRLLTQFNDTATAVPELTVPELFESQVARTPDAPAVVCDDRTLTYRELDERADGVARELVRRGAGPEDLVVLALPRTEDLVAGLLGILKSGAGYLPMDPQYLAGRAESVLAEARPRFVVTDTKTSQDLPPNDMSSIYLDDRAQWDAPVKTPDDGGRISPPRPDNLAYVMYTSGSTGKPKGAAITHRNVVNGVRELSRVLDAPPGWRMLAGTSVNFDVSVFELLTTLSTGGTAEVVPNALALGERDSWDGHVISAVPSVLGELVGHLEKTTDVRTVVFAGDVLPARLVRQVREALPGVQVVNSYGQSESFYATTFALPASEEWAESEVAPIGTPLGNMRAYVLGPGLAPVPQGAVGELYVVGTCLGRGYHGRPGLTAERYVANPFGPAGERMYRTGDLARWNARGRLECLGRGDGQVKVRGFRIETAEVEAALTAHPGISEAVVISRDVSPGGRRLVAYVVHAGEGAVGDDGAGGIGDVDVLAGASAAELRTFVAARLPDYMVPSAFVALDRMPLGPTGKLDRSALPEPEFVGEGYREPRTEAEAIITVAYADVLGVERVGIDDDFFAVGGDSLRSIQVVARARARGLDLTTREIFECRTAARLAEVASARQDRAPALAELEGGGVGPMPLQPVARQVFEHGGGMNRFAMSMVLELPAGIDERGLAATLDAVLDRHDLLRARLVRGDEFSLVAQPQGSVRAADLIRRVGCDGRWDDPSSLEAAKAELDDAVGRLDPEAGTMADFVWFAPEAGTGRLLVVLHHLVVDGVSWRILMSDFAEAWQQVRAGRTPELPAVGTSARRWASALEDEALSAEREAELAYWRDLLEVPDPALGTRVFDPAVDVMSTVDTVRVQVPADVTEAVLTRLPAAFKGTGTDVLLAALALAVNRWRGADRSALVRLEGHGREEDVVPGADLSRTVGWFTSMYPVRVDV

SEQ ID NO: 9 - protein, 1013 aa, Streptomyces griseochromogenes
EVWPQAPGQSGIQFEAALADGSFDVYHMQFVLHLSGHVDPERMRSAGQALLDRYPNLRSAFLAAAGGDPVQVVADHVALPWRHIDLTGRAAAEQDAALDQALADDRADRLDPGKPPLMRLALLTCGPRQAKLIITAHHTLFDGWSSPLVIKDLIRLYSTAGGLGPVRGYGDYLTWLSTRDRKASAAQWAAELTGFDQPTLVAPNAPVQEAASALGRVEVPLSIDKGRELARRAAELGVTLNTLLQGAWGILLSKLTGRQDVVFGAAVNGRPAELAGSDEMVGLFINTLPTRASCRPDHSVAQVITDLQNRQTALLDHHYYGLADIQRDVGLPALFDTIVVFENYPIDRAGIVDANTAAGFTIDAIRPFAGSHYPLTLNASDPYLRTSLDYQNNLYDREAAELIAARLVRVLDQVLDDPTVPVGAVEVLSREEWDRLVRRVNDTARPVAADTLPGAFEAQVARDPDRVALIGERERLTYGEFDRRANQLAHWLVEQGAGPEQLVAVRIPRSVDLMVAIYAVVKAGAAYVPLDTELPEDRVRHVLDSAEPLLVLDGTLPDVSAYPTTNPERVLSPDNAAYVIFTSGSTGGPKGVQVSHRSIMNRLKWGLAHFDVGTEDRVLLSTSASFDVSVPELFAPLQVGAAVVIARPDGRRDPSYLAELIRRERVTGADFVPSLLEAFAGEPAAKRCDSLRWIEVAGEAFPAALANKVVDLLPDCGVHNLYGPTEAAVEVTAWQHVPGADRVPIGAPVWNTQVYVLDAALRPVAPGVAGELYLAGAGLARGYLGRSALTANRFVACPFGPAGARMYRTGDLVRWNEDGQVEYIGRTDFQVKVRGFRIELSEVESALTAHPDVDNAVVVVREDRADDQRLVAYVVPGGGRADPSGLDLAALTDLVRGRLPEYMVPSAIVPLAAFPTTASGKLDRKALPAPDHTEATAGRGPRNHHEEVLCRLFAELLGVEEIGIDVDFFDHGGHSLLATRLIGRIRSEFDADVKVTTVFRHPTVAQLAEQIQK

SEQ ID NO: 10 - protein, 1751 aa, Streptomyces griseochromogenes
IPLSFAQSRMWILHKLEGPSATYNVPFVLRLEGVLDTTALATAVTDVTNRHESLRTLVVEDAGGTASQRIVTPEEAVFPFRVVDVAADAVDAAMHEVACEPFDLDTELPLRTTVLRIAPQEHVLVFVFHHIAADGASVAPFVRDLVSAYTARHRGSAPQWTPLPVQYKDYTLWQRQLLGDETDPESTAAEQIAYWKKELAEVPQPLQLPLDRPRPTAASHRGGEVPFVLAPELLSGVQKLAADHGATAPMVAQAALAVLLHKLGAGEDVPIGSPIEGRGDEQLDDLIGFFVNTWVLRADLSRNPSFADLLEQVRDKALAAYDNQDIPFERLVELLNPDRTTAYMPLFQTALGWQFVWGEIEMPGLRVTPIPVGTGTAKFDLLFNIVPNASGGTRGLLEYATDLFDHTTAERIVDRFVRILEQVLEDPAVPVGAIEVLSAQEQDWLLRGATDTALSVPERTVDALFSERAAATPDAVALVCGDVTLTYREVDERANRLARVLTERGVEPESVVAVVVSRSPQWVVALLGVMKAGGAYLPVDPAYPAERVAFMVADSGAVLVIGDAVSAGQVPELSAPMIRLDDPDVVAALAGADPGPVTDADRRGPVAVANTAYVIYTSGSTGTPKGVAVSHSGVASLAASQAERLAVTPDSRVLQFASPSFDASLWEWSMALLTGAALVLAGPDELAAGDPLIETIAAHGVTHATLPPVVLAALPTGALPSVETLVVGGSASSPELVAQWSAGRRMINGYGPTEITVCAAMSTAMVGDGRTPPIGRPIANTQAYVLDTALRPVAPGVAGELYIAGPGLARGYLGRTGLTADRFVACPFGAPGTRMYRSGDLVRWNQDGELEYLGRTDFQVKIRGFRIELGEIEHALTMHPGVAQAAVVVNENQLGDKQLVGYLVPKPYAAAVAGADAQVDEWRHLYDDSYADSSDEELGEDFQGWNSSYTGEPIPREQMLEWQDAAVAQVLRFEPRRVLEIGVGSGLLLAKIVDEVEEYWGTDISATVVDRVRAQAAEAGYGDRVRVSAQPADDMSGLPRGRFDTVVLNSVVQYFPSVEYLDQVLRQVMELLVAGGRVIVGDVRNAATRTLMQTAVQRTAHPHASHDELRTLVKRELLAERELAIAPEWFTEWAGDDSVAVDIRLKPGQAHNELTRHRYEVVLYKRPADVLDLAGVPSVPWGREVHDLADLGRCADRAGGPVRVTGIPNARLAEEAALTVATGLLDPAPRSGEPVDPQELLQWARKDDRDVVLTWSGEDTRCFDAVLLPERRTGQPHVSGSFVPSGAGGRVRANNPALARSIGPLLIELPEYLRERLPDYMVPPALVPLSELPLTPNGKLNHRALPAPDYGQAATGRAPRNQVEETLSALFAEVLGVDNVGIDNDFFATGGDSIRSIQIVARARARGIEVSTREIFEHRTVARLADLVEGREEERLTLAELPGGGVGWAPLMPTAKHVLALGGGLGRLCMSMMLTLPEGIDRAGLVATVQTVLDRHDVLRSRLDRTRQGLSIEPAGSVDAGALLREVRYGDADAHAELDAAADRLDPDAGVMAQFVWFTSDTDTDADRLLIVLHHLVVDGVSWRLLLPDLVSAWKQVRDGRTPEPAGPGTSLRRWAHALADEAARPERVAELPVWRQILRGDEPVLGARELDPARDVAATVETVRVHVPADVTETVLTKVPAVFRGGVDDGLLAALALALTRWRRTRGVPASSALVRLEGHGREEEAVPGADLSRTIGWFTTMYPVRLDLA

SEQ ID NO: 11 - protein, 1032 aa, Streptomyces griseochromogenes
LAEVWPVTSAQSGILFHSMLAGSSFDAYHVQLVFHISGDVDPERMSRAGQMLLERHTSLRAAFVDGADGDLVQVVPAAGVTLPWRYLDLTGYGEAERTETFERFLAQDQAAHFDVGTPPLIRLALVALEPGRAELVMTVHHSLADGWSSPLLLQDLLLLYASHGDAAGLPGTRSYGEFLAWRARQDQDEAARAWAAELDGVDEPTLLAPGATGGDGLDQVEVALPLDLSGELNRCASVLGVTINTLVQGAWALLLGQLTGRQDLVFGATVSGRPPAVTDVETMVGMFINTLPVRVEYAPGDTLAEVLTRLQSRQAGLVEHHYYGLTEIQQSVGLQNLFDTLVVFESYPVDRDGLSSATDAADGIAITGLRPSNGTHYPLALMAAVDTHLQFLLQYTPGVFDRDTVEAYAARFVRILEQLAATPELKTAQLDVLEPAERDRLLVEFNDTAVPTPDVSVNALVEAQAARTPDEVAVVAEGESLTYREVNARADRLACELAARGVGPESMVAVSLPRSADLVVALLAVLKAGGTHLPVDPRYPSHRLAAIFEEARPHLVLTDQATVGVLPEHDAPDVLLGSLDLSGDVTGLEIPSHADQLAYVMYTSGSTGKPKGVAITHGCVVNAVLRLAPIVGMEPGKRLLAAASVNFDISVFEIFTTLATGGVVDVVQDVLVLGDRKGWSGSVIHTVPSAFAELVDDIADRTSVETLVFAGEALPSSLVEKTRDAFPGVRIVNAYGQTESFYATTFTVDGERPVSAGSAPAGAPLGNNRAYVLGPGLTPVPPGAVGEIYIGGNVARGYHGRAALTAERFVPDPFGPTGARMYRTGDLGRFNGEGQLEYVGRGDAQVKVRGFRVEPAEVEAALSAHPGVAQTAVIARDGRSTGKQLVAYVVPAVTGDSTTTGDPRGPETKELHDFVAERLPDFMVPSAFVVLDRLPLATNGKLDRAALPEPEYTGAAYRAPRTAREESLAALFAEVLGVDRVGIDDGFFELGGHSLLATRLISRARAEMGIEIPIRKIFDLPTVAALAAWSEE

SEQ ID NO: 12 - protein, 1264 aa, Streptomyces griseochromogenes
IPLSFAQRRMWILHQMEGGSENWNMPAAFRLTGALDQAALTAAIRDVVDRHETLRTVYETNDDGELYQRILPTAEATPEVPVIEVAPGDVSGTIEEAFGYRFDLAAEPPLQVRLFRCSPQEHVLVLVIHHIATDGSSVAPLVRDLAAAYTARRDGRAPAWEPLPVQYKDYTMWQRELLGDVADPDSLAAAQVAYWRKELAGVPQPLNLPLDRPRPVQASGRGSTVGLMVEPEVASGLQKLADERGATMSMVLHAALAVLLRKLGGGDDVTIGSSIAGRTEEALADLVGFFVNTQVLRVDLCGDPSFTDLLAQVRHKSLAAYEHQDVPFDMLVEAINPERSAAYQPLFQVMLGLQNYERPELELAGLTLEVEQTIPSTSKVDLFFNMIVDDSGALRGDISYATDVFDRETVEAFGARFVRVLEQLVGDPGMCVGDVDVLSPGERQRLVVEVNDTAEPTLELVEAVRRQVRATPEALAVIGEEESLTYQELEARSNRLAHWLADLGVRAESRVAVCLPRTVNLVVALLAVIKAGGAYVPIDPEHPRSRIDYILEHADPLLVLDAEALAGVDWPAYPDAAPEVVVRPENAQYVIYTSGSTGKPKGVAIPRGAVANYLATTQRRFPLSSADRMLFSTTVAFDMANTELYLPFTAGATMVMAGKDTVTDPSAVLELIRRHGVTAVQATPAFWQMLLMHDPNAAKGLRIIIGAEAVPVRLAETLAKQAAEVFNMYGPTETVTWCTEARVEVGQGAPIGRPVGNTQVYVLDSRLSPVSRGVPGELYIAGAGMARGYQGRPELTAERFVACPFGPAGARMYRTGDLVRWDGNGQLEYLERTDFQVKIRGFRIELGEIEHVLTGHPGVAQAAAVVRENQDGDKRIVGYVIPEPDASQADGGVQALLAELPAYLRGRLPDYMMPSTLIPLSEVPLTPNGKLDRGALPSEDINAAVSREPRNSHEERMCALFGELLGIERVGIDDDFFELGGHSLLATRLSARIRGEFDIEMPLRTIIKYPTAGELAALLLVTTPAESSDPLAVVLPLNSDPGTGKPPLWFFHGGGGLGWTYFSFASYVPDWPAYALQARGSDGVDKLAGSVKEMVEDYVTEMLKIQPEGPFHLIGWSYGGTVVQAVAEALDRRGHEIAFVAILDSQPGGHGFTEIHAGKALPDYRSELEEFFGQYIGTDNRQDFLDAMAKVLANNHTLMMDFESPVYRGDVLFFSATLQERSYAHLWRPYVLGSIEVHDVRATHHEMNMPAAVAEVMEVIKRKL

SEQ ID NO: 13 - protein, 1076 aa, Streptomyces griseochromogenes
MISVRSFGASSAHKGLWRAQEMFPDTLNHALTLWNVDGELDAAVMESAFLHVMGEAEVLRVTFVDDGDGLRLVPRELGDWRPFFLDTGAEDDPEQAAREALADMVRQPFDLERDLLFRLGVVRLAAARSVLVIIYHHLISDGFGAAGLLSRRLAEVYTALSRGADVPELPHPWDAESFATEAAQYSASEQFAEDTEFWRDYLADAPAPARIPRVALSDAMRSALSEPMGSADRWGELTEPIGMVSRTLTVPHADAQAWTEAAKSMGVWMSSMLTAAAAVFLRHRCDRPEFLLSLAVANRVGAASRTPGLAVNVVPVRVKVPLGATFTEIADAIGDETYEIFDHAACHYSEIQRASGTVLNDRGSFGAVVNVVEFAERLRFADSPAHFLGGTTGTFEELAIGVYTDGTADSDLFIRLDAPASLYSRAELRFIGEDLIAHIRAVVAADEQPVGALDVVSGAERDRVLTAPNDTNVPVPGLRVPELFARQVDRAPDAVAVVSGDSAVSYRELDERSSRLAGALRQRQVGPETVVAVALPRSVDLVVALLGVVKAGGAYLPVDPTFPAARIAPVARDASVRALLTDMATAEALSGDLDVPAILFDDIRPDTAADSDAATEVPLPSRQDGLLAVMYGSGPTGAATGVAVTHRNMERFALDRRWREGGRDTVLWHAPHTSDALPLEVWVPLLNGGRVVVAPPGELDIDALTEVRAAHEISTVWLPAGLFSAIAAERPERLAGLREVWTGGERVSAAAVRRVREACPELTVVTGHGPTETTVFAASHRMAADEPVHHAGAVGRPMDHTALYVLGPGLAPVPVGVAGELYVAGPGVTRGCPGRPGPTAERFVPCPFGPAGARMYRTGDRVRWSTDGLLEYVGRAGARADVRGTRVELAEVEEALSEHTSLARSVVVVSEDTSGQQRLVAYVVPVGGRTVAGDELRRFAAGRLPEFMVPSVFVVMERLPLTAGGRVDRYSLPEPTFDDDKYRAPRDHTERVLAEAFADVLELDRVGIDDDFFDHGGNSLRAIRLTGLIRAELNQEVPIRTLFAARTIAGLSDSWKELARSSRPTLRRRTKEGEAL

SEQ ID NO: 14 - DNA, 7785 bp, Streptomyces griseochromogenes
atgatcccgttgtcgttcgcgcagcgtcgactgtggttcgtggaccggttcgaaggtccttcgccggcctacaacggccctctcgccctgcggctgaccggtgagctgaacgtaggcgcacttcaggcggcggtcggcgacctcatcgaccggcacgaagccctccgcacggtcatcgtcgaggacgacgacggcgtcccgcaccagcgggtgctgccctccggtcagaagcggttcggcctgcgggtcgtcgaggccgcgacggaggaggagcgggcggcggcggtcgacgaggcggccaccgggaccttcgacctggccgccgacgtgccgatccgcgccaggctggtgcggcgcggaccgcgcgagcacaccctggtgctggtgatgcaccacatcgccgtggacggggagtccttcggaccgctgtgccgcgatctcatcaccgcctacacggcccgccaggagggcagggctccggcgtgggagccgctcccggtgcagtacgcggactacacgctgtggcagcgggacgtactcggggacgaagccgatccgcacagcctggcggccaggcaactggagtactggcggcggacgttggccgacctggcgcagccgctggcgttccccaccgatcgcccgcgcccgaagacgatgagccaccacggcgacatggtcccgttctcgatcgaccccggcctgctccggtccgtggagaagctcgccgcgcaggcggacaccacggtctcgatggtcatgcagtccgccctggcggtcctcctgcaccacctcggctgcggtgacgacgtgcccatcggcgcaccgatcgcgggtcgcaccgacgaggaactgcgcgagctcgtcgggttcttcgtcaacacctgggtgctgcgcgtcgacctctccgggaacccgaccttccgcgagctgctccagcgggtgcgggagcgggccctcgccgcgtacgacaaccaggacatgccgttcgagcggctggtggagctgctgaacccggaccggtccaccgcctacaaccccctcttccaggtgatgctcgcctggcagccccccataccggaaccggagttccccggcctcgacgtccagtccgagcggctcgagaccgcaacagccaagttcgacctgttcttcgacctgatcccgcacggttcgggcggggcgcggtgccgtctggagtaccgcaccgacctgttcgacagggacaccgtcgagggcatcgcgaaccgcttcgtccgtgtgctgggccggctcgtggccgacgcggaacgcaggatcggcggcatcgacgtactcgacgcggccgagcggggccggctgctcacccagttcaacgacaccgccacggcggtgcccgagctgacggttccggagctgttcgaaagccaggtcgccaggacgccggacgcaccggccgtcgtgtgcgacgaccgcacgctgacctaccgggagctggacgagcgggcagacggcgtcgctcgggagctggtgcgccggggtgccgggccggaggacctggtggtcctcgcgctgccgcgcacggaggacctggtggccgggctgctcggcatcctcaagtccggtgccgggtacctgccgatggacccgcagtacctcgccgggcgggccgagagcgtgctggccgaagcacgcccgcgcttcgtggtcaccgacaccaagacgtcgcaggacctgccgccgaacgacatgtcgagcatctacctcgatgaccgcgcgcagtgggacgcgcccgtgaagacgccggacgacgggggccggatctcgccgccgcgcccggacaacctggcgtacgtgatgtacacctccggctccacgggcaagcccaagggcgcggcgatcacccaccgcaacgtcgtcaacggagtgcgggaactgagtcgcgtcctggacgcgccgcccggctggcggatgctggccggcacctcggtgaacttcgacgtctcggtcttcgagctgctgaccaccctgtccaccggcggcaccgccgaggtggtgccgaacgcgctggcgctcggcgagcgggactcctgggacggccatgtgatcagcgcggtgccctcggtgctcggggaactggtcggccacctggagaagacgacggacgtgcgcacggtcgtgttcgcgggcgatgtccttccggcccggctggtgcggcaggtgcgcgaggccctgcccggcgtgcaggtggtgaactcctacggacagagcgagagcttctacgccaccacgttcgcccttccggcgtccgaggagtgggcggagagcgaggtcgcgccgatcggcacgccactgggcaacatgcgggcctacgtgctcggcccgggactcgccccggtgccgcagggcgcggtcggcgagctgtatgtggtggggacctgcctcggccgcggctaccacggccgcccgggcctgaccgctgagcgctacgtggcgaacccgttcggccccgcgggcgagcggatgtaccgcacgggcgacctggcgcgctggaacgcgcgtggccggctggagtgcctcggccgcggcgacggccaggtgaaggtgcgcggcttccgtatcgagacggccgaggtcgaagccgcgctcaccgcgcaccccgggatcagcgaggccgtggtgatcagccgcgacgtgtccccgggcgggcggcggctcgtcgcgtacgtggtgcacgccggcgagggagccgtcggtgacgacggcgccggcggcatcggcgatgtggacgtgctggccggtgcctcggccgccgagctgcgcacgttcgtcgcggcccggctgcccgactacatggtgccgtcggccttcgtggccctcgaccggatgccgctcgggccgaccggcaagctggaccgctcggcactccccgagccggagttcgtgggcgagggctaccgggagccgcgtaccgaagccgaggcgatcatcaccgtcgcgtacgcggacgtgctcggtgtggagcgggtcggcatcgacgacgacttcttcgcggtgggcggggacagcctgcgctcgatccaggtggtggcgcgggcccgggcccgcggcctggacctcaccacgcgggagatcttcgagtgccgcacggcggcccgcctcgccgaggtggcctccgcccgccaggaccgggcgcccgcgctcgcggagctcgagggcggcggcgtcgggccgatgccgttgcagccggtggcgcggcaggtgttcgagcacggcggcgggatgaaccgcttcgccatgtcgatggtgctcgagctgcccgcgggcatcgacgagcgtggcctcgccgcgacgctggacgccgtgctcgaccggcacgacctgctgcgcgcgcggctggtgcgcggtgacgagttctccctcgtcgcacagccccagggctcggtgcgggcggcggacctgatccgccgggtcggctgcgacggccggtgggacgacccgtcctcgctggaggcggcgaaggcggagctggacgacgctgtcgggcggctcgacccggaagccgggaccatggcggacttcgtctggttcgcccccgaggcggggacgggccggctgctcgtggtcctgcaccacctggtggtggacggcgtgtcctggcgcatcctcatgtcggacttcgccgaggcgtggcagcaggtccgggccggcaggacgcccgagctgcccgccgtcggcacctcggcccgccgctgggcgtcggccctggaggacgaggcgctctccgcggagcgggaagcggaactggcgtactggcgcgacctgctggaggtgcccgaccccgcactgggcacgcgggtgttcgacccggcggtggatgtgatgtccacggtcgacaccgtgcgggtgcaggtgcccgccgacgtcaccgaggcggtcctgaccaggcttcccgcggcgttcaagggcaccgggaccgatgtgctgctcgccgcgctcgccctggcggtcaaccggtggcgcggtgcggaccgttcggccctggtccgtctggagggccatgggcgtgaggaggacgtcgtccccggggccgacctctcccggaccgtcgggtggttcaccagcatgtacccggtccgggtcgacgtgtgcggggtggacctggccgacgtgctggcgggcggctccgcggccgggaaggcgatcaagctggtcaaggagcagttgcgccaggtcccggacaagggcgtcgggtacgggctgctgcggtatctgaacccggagaccgccgcacagctcgccgagtacccggtgccgcagatcgggttcaactacctcggccggatctccgactccgacgtccccgagcacctgcgcgcggacggatggggaccggcgtcatggtccgccgagctgatcgccatgcccgatccggatctgcccgcgctgtccgcgctcgaggtcgcctcggtcgccacggacaccgtggacggcacccggttgcagacggccttcatgttccccaccgggctgctgtcccgcgagcggatctccgaactggccgagctgtgggtggaggtgctgcacggcatggccgcgcacgcggcacagcccaggaccggcggcctcacgccctcggacgccccactggtctcggtgcggcaggacgagatcgaggcctgggagacgcgctacggccggctgaccgaggtgtggccgcaggcaccggggcagtccgggatccagttcgaggccgcgctcgccgacggctccttcgacgtctaccacatgcagttcgtgctccacctgtccgggcacgtggacccggagcgcatgcggtcggccgggcaggcgctcctcgaccgctatccgaacctgcgttccgcgttcctcgccgcggccggcggcgacccggtgcaggtcgtggcggaccacgtcgccctgccctggcggcacatcgatctgaccggtcgcgccgcggccgagcaggacgcggcgctcgaccaggccctcgccgacgaccgggccgaccggctcgaccccggcaagccgccgctgatgcgcctggccctgctcacctgcgggccgcggcaggcgaaactcatcatcacggcgcatcacaccctgttcgacggctggtcctcgccgttggtgatcaaggatctgatccggctgtactccacggccggcgggctcggcccggtccgcggctacggggactatctgacctggctgtccacgcgggaccggaaggcgtcggccgcccagtgggccgccgagctcaccggattcgaccagccgaccctcgtggcgccgaacgctcccgtccaggaagccgcgtccgccctcgggcgggtcgaggtaccgctgtcgatcgacaaggggcgcgaactcgcccggcgcgccgcggaactcggcgtcacgctgaacacgctcctgcagggcgcgtggggaatcctgctctcgaagctgaccgggcggcaggacgtggtgttcggagccgccgtcaacggtcgtccggccgagctggccggttcggacgagatggtgggcctgttcatcaacaccctgccgaccagggcgtcgtgccgaccggaccacagcgtcgcgcaggtcatcaccgatctgcagaaccggcagaccgcgctgctcgaccaccactactacgggctcgccgacatccagcgcgacgtcgggctgcccgccctgttcgacacgatcgtcgtgttcgagaactacccgatcgaccgtgcgggcatcgtcgacgcgaacaccgcggcgggattcacgatcgacgccatccggccgttcgcgggctcgcactacccgctcaccctcaacgcctccgacccctacctgcggacctccctcgactatcagaacaacctctacgaccgcgaggcggccgagctgatcgccgcccggctcgtccgggtcctcgaccaggtgctcgacgacccgacggtgccggtcggagccgtcgaggtgctgtcgcgggaggagtgggaccggctggtgcgccgggtcaacgacacggcgcggccggtggccgcggatacgctgccgggcgcgttcgaggcccaggtggcacgggaccccgaccgtgtcgcgttgatcggcgagcgggagaggctgacgtacggggagttcgaccggcgagccaatcagctggcgcactggctggtcgaacagggcgcgggacccgagcagttggtcgcggtgcgcatcccgcgttccgtcgacctgatggtggcgatctacgcggtggtcaaggcgggcgcggcctatgtgccgctggacaccgagctgcccgaggaccgggtgcggcatgtgctggacagcgccgagccgctgctggtgctcgacgggacgcttccggacgtgtccgcgtacccgaccacgaaccccgagcgggtgctgtcgccggacaacgccgcgtacgtcatcttcacctccggctcgaccggcggcccgaagggcgtgcaggtgtcgcaccgatcgatcatgaaccggttgaagtggggcctggcgcacttcgacgtcggcaccgaggaccgggtgctgctgagcacatcggcgagcttcgacgtgtcggtgccggagctgttcgcgccgttgcaggtgggcgccgccgtggtgatcgcgcgtccggacgggcggcgggatccgtcctatctggccgagctgatccggcgggagcgggtgaccggcgcggacttcgtgccctccctgctggaggcgttcgccggcgagcccgcggcgaagcggtgcgacagcctgcgctggatcgaggtcgcgggtgaggcgttcccggcggcgctggcgaacaaggtcgtcgatctgctgccggactgcggtgtgcacaacctctacgggcccaccgaggcggcggtggaggtcacggcgtggcagcacgtgccgggggcggaccgggtgccgatcggcgcgccggtctggaacacccaggtgtacgtgctggacgcggcgctgcgcccggtcgcgccgggagtggcgggcgagttgtacctcgccggtgccggcctcgcgcggggctacctcggccggagcgcgctgaccgcgaaccggttcgtcgcctgccccttcggccccgccggggcgcggatgtaccgcaccggagacctggtgcgctggaacgaggacggccaggtcgagtacatcggccgcaccgacttccaggtcaaggtccgcggattccgcatcgagctgagcgaggtggagtcggcgctgaccgcgcacccggacgtcgacaacgcggtggtcgtggtacgcgaggaccgcgccgacgaccagcggctggtcgcgtacgtggtgccgggaggcggcagggcggatccgtccgggctggatctcgcggccctgacggatctggtccgtgggcgtctgccggagtacatggtcccctcggcgatcgtgccgctcgccgcgttccccacgacagcgagcgggaagctcgaccgcaaggcgctccccgcccctgaccacaccgaagccacggccggacgagggccgcgcaaccaccacgaggaagtcctctgccggctgttcgccgagctgctcggcgtggaggagatcggcatcgacgtcgacttcttcgaccacggagggcattcgctgctggccacccggctgatcgggcgcatacgcagcgagttcgacgccgacgtgaaggtcacgacggtgttccgccatccgaccgtcgcccagctggccgagcagatccagaagctggccacgtcgaaacgtccccggctgcgacagatgaccgtacaggagaaccgtcgatga

SEQ ID NO: 15 - DNA, 8952 bp, Streptomyces griseochromogenes
atgatcccgttgtcctttgcccagagccggatgtggatcctccacaagctggaaggcccgtccgcgacctacaacgtgccgttcgtgctgcgcctggaaggggtactggacacgacggccctggccacggcggtgacggacgtcacgaaccggcacgagagcctgcgcaccctggtcgtcgaggacgcgggcggcacggcgtcgcagcggatcgtgactcctgaggaggcggtcttccccttccgtgtggtcgacgtggccgcggacgcggtggacgcggcgatgcacgaggtcgcgtgcgagccgttcgacctggacacggagctgcccctgcggacgaccgtgctgcggatcgctccgcaggagcacgtcctggtgttcgtgttccaccacatagccgcggacggggcgtcggtggcgcccttcgtcagggacctggtgtcggcgtacacggcccgccatcgcggcagtgcaccgcagtggacgccgctgcccgtgcagtacaaggactacacgctgtggcagcggcagctcctgggtgacgaaaccgacccggagagcaccgcggcggagcagatcgcctactggaagaaagaactggccgaggtgccgcagccgctgcagctcccgctggacaggccacggccgacggcggccagccaccgcggcggcgaggtccccttcgtgctggcaccggagctgctgtccggggtgcagaagctcgccgcggaccatggtgccacggcgccgatggtggctcaggctgcgctggcggtgctgctgcacaagctgggtgcgggggaggacgtgccgatcggcagtccgatcgaagggcgcggggatgagcaactcgacgatctgatcgggttcttcgtcaacacctgggtgctgcgcgccgatctgtcgaggaacccgtcgttcgccgatctgctggagcaggtgcgggacaaggccctcgccgcgtacgacaaccaggacataccgttcgagcggctggtggagctgctcaacccggaccgcaccaccgcttacatgccgttgttccagacggcgctgggctggcagttcgtgtggggcgagatcgagatgccgggcctgcgggtcacccccatccccgtgggcaccggcaccgcgaagttcgacctgctcttcaacatcgtcccgaacgcgtccgggggcacgcgcggcctgctggagtacgcgacggatttgttcgaccacaccacggccgaacgcatcgtcgaccggttcgtgcgcatcctggagcaggtgctcgaggacccggcggtgccggtcggcgccatcgaggtgctgtcggcgcaggagcaggactggttgctccggggagccactgacacggcgctgtcggtgccggagcgaaccgtcgacgcgctcttctccgagcgggccgccgcgacgccggacgcggtggcgttggtgtgcggggacgtgacgctgacgtatcgggaggtggacgagcgagccaaccggctggctcgggtgctgaccgaacggggtgtggagccggagtcggtggtcgcggtggtggtgtcccgatcgccgcagtgggtggtcgcgctcttgggagtgatgaaggcgggcggggcgtatctgccggtggatccggcctatccggcggagcgcgtggcgttcatggtggcggattccggcgcggtgctggtgatcggggacgcggtctcggcgggacaggtgccggagttgtccgcgcccatgatccgcctggacgatccggacgtggtcgcggcgctggccggcgccgacccgggccccgtgaccgacgccgaccggcgcggtccggtggcggtggccaatacggcgtacgtcatctacacctcgggttcgaccgggacgccgaagggagtggcggtcagtcactcgggggtggccagcttggccgcgtcgcaggcggagcggctcgcggtgacgccggacagccgggtgttgcagttcgcctcgccgagcttcgacgcctcgctgtgggagtggagcatggcgctgctgacgggggccgcgctggtgctggccggcccggacgagctggccgcgggtgacccgctgatcgagacgatcgccgcccacggggtgacgcacgcgacgttgccgccggtggtgctggcggcgttgccgacgggggcgttgccgagtgtggagacgctggtggtcggaggttcggcgtcctcgccggaactggtggcccagtggtcggccgggcggcggatgatcaacggctacggcccgacggagatcaccgtgtgcgccgccatgagcacggcgatggtgggtgacggccgtactccgccgatcggccggccgatcgccaacacccaggcgtatgtgctggacacggcgctgcgcccggtcgcgcccggggtcgccggtgagctctacatcgccggcccggggctcgcccggggctacctcgggcggacgggcctgaccgcggaccggttcgtcgcctgccccttcggcgcgccgggcacccggatgtaccgctccggggacctggtgcgctggaaccaggacggcgagctcgagtacctcgggcgaaccgacttccaggtcaagatccggggtttccggatcgagctgggcgagatcgagcacgcgctgacgatgcaccccggtgtggcgcaggcggcggtcgtggtgaatgagaaccagctgggcgacaagcagcttgtggggtacctggtgcccaagccgtacgccgccgcggtggctggtgccgacgctcaggtggatgagtggcgccacctctacgacgacagttatgccgattccagcgatgaggagttgggcgaggacttccaagggtggaactccagctacaccggtgagccgatcccgcgtgagcagatgctggagtggcaggacgcggcggtggcacaggtgttgcggttcgagccgcggcgggtgctggagatcggtgtgggttccggtctgcttctggcgaagatcgtcgacgaggtcgaggagtactggggcaccgacatctcggccacggtggtggaccgggtccgggcgcaggccgcagaggccggatacggtgacagggtccgggtgagcgcccaaccggccgacgacatgtccgggctgcctcgcggccggttcgacaccgtggtgctcaactcggtggtgcagtacttcccgagcgtcgagtacctggaccaggtgctgcgccaggtgatggaactcctcgtggcgggcggccgcgtcatcgtcggtgacgtccgcaacgccgcgacacgcaccctcatgcagacggcggtgcagcgtacggcacacccgcacgcctcgcacgacgagttgcggacgctggtgaagagggagctgctcgccgagcgggaactggccatcgccccggagtggttcaccgagtgggcgggagacgactccgtcgcggtcgacatccggctgaagcccgggcaggcgcacaacgagctgacccggcaccgctatgaggtcgtcctgtacaagcgaccggctgacgtactcgacctggccggtgtgccgtcggtgccgtggggccgggaagtgcacgaccttgccgatctcggccgttgtgcggaccgggcgggcggtccggtgcgggtgaccgggatacccaacgcgcgtctggccgaggaggccgcactgacggtcgcgacgggtctcctcgacccggcgccccgctccggtgaaccggtcgatccgcaggaactgctccagtgggcacgcaaggacgatcgggacgtggttctcacctggtcgggggaggacacgcggtgcttcgacgcggtgctgctgcccgagcggcggaccgggcagccacatgtctcgggctcgttcgttccgagcggtgcgggcgggcgggtccgggcgaacaaccccgcgctggccaggtcgatcggtccgttgctcatcgagctgcccgagtacctgcgtgagcgtctgccggactacatggtccctcccgcgctcgtgccgctttcggagctgccgctgactccgaacgggaaactgaaccaccgggcgctgcccgcgccggactacgggcaggcagcgaccggtcgggcaccgcgcaatcaggtcgaggagaccctcagcgcgctgttcgccgaagtgctcggcgtggacaacgtcggcatcgacaacgacttcttcgccaccggcggggacagcattcgctccatccagatcgtcgcgcgggccagggcgcgtggcatcgaggtgagcacgcgggagatcttcgagcaccgtacggtcgcccggctcgcggacctggtcgaaggacgcgaggaagaacgcctcaccctggccgagctaccgggtggcggcgtgggatgggctccgctgatgccgacggcgaagcacgtgctcgcgctcggtggcggccttggccggctctgcatgtccatgatgttgaccctgcccgaaggcatcgaccgcgccggactggtggcgacggtgcagaccgttctcgaccggcacgacgtgctgcgttcccgactcgaccggacgcggcagggcctgtcgatcgagccggccggcagcgtggacgccggcgcgctgctgcgggaagtgcgctacggcgacgccgacgcgcacgccgagctggacgcggccgcggaccggctggacccggacgcgggcgtcatggcgcagttcgtgtggttcacctcggacacggacacggacgcggaccggttgctgatcgtgctgcaccacctggtcgtcgacggggtgtcgtggcggctcctcctgcccgacctggtctcggcctggaagcaggtccgggacggccgcaccccggaaccggcagggccgggcacctcgttgcgccggtgggcgcatgccctggccgacgaggcggcccgtcccgagcgggtggcggagctgcccgtgtggcggcagatcctgcgtggggacgagccggtactcggagcacgggagctggacccggcgcgcgatgtcgccgccaccgtggaaacggtgcgcgtccacgtgccggcggatgtcaccgagaccgtgctgaccaaggtgcccgcggtcttccggggcggtgtcgacgacgggctgctggcggcgctggcactggcgctgacccgctggcgtcggactcggggcgttcccgcttcgtcggctctggtccggctggaagggcacggccgggaagaggaggcggtgcccggcgcggatctgtcgcgcacgatcggttggttcaccacgatgtatccggtgcgccttgacctggccggcgtcgacgtggcggacgccttcgccggcggtccggccgccggccgggcgatcaagacggtcaaggagcagttgcgggcggttccgggcgacggtatcggcttcggcctgctgcgccacctcaacccggagaccgccgccgcgctgtccgcggaccgggaaccgcagatcgggttcaactacctcggccggacgtccggcacggatgtccccgaggagctgcgtggccagggctgggcaccggacaccacacagcgggacctgatcgccgcgccggacgcggacatgccggtgatgtcggcgctggagatcaacgcggtggccacgaacaccggcgccggtgacgagctgaccgcctacttcggcttcccgaccggtctgctctcccacgaggaggtgaccgagctggccgacctctgggtccaggcactgaccgccctggcccggcacgccgcgacacccgacgccggcggaatgaccccgacggacgcgcccctggtcgacgtgagccagcgggagatcgacacctgggaggctcggttcggccacctggccgaggtgtggccggtgacctcggcgcagtccgggatcctcttccattcgatgctggccggatcctcgttcgacgcctaccacgtgcaactggtgttccacatctccggtgacgtcgaccccgagcggatgagccgggccgggcagatgctgctcgagcgccacaccagcctccgtgcggcgttcgtcgacggggccgacggcgatctcgtgcaggtggtgccggcggcgggggtgaccctgccgtggcggtacctcgacctgaccgggtacggcgaggcggagcggaccgagacgttcgagcgcttcctcgcccaggaccaggccgcccacttcgacgtgggcaccccaccgctgatccggctggcactcgtcgccctcgagcccggccgggccgaactcgtgatgaccgtccatcactcgctggccgacggctggtcctcgcccttgctgctgcaggacctgctgctgctctacgcatcccacggcgacgcggccggtctgcccggcacgcggagctacggtgagttcctggcctggcgcgcacggcaggaccaggacgaggcggcacgggcgtgggcggccgagctcgacggggtcgatgaaccgaccctgctcgctccgggagccacgggcggcgacggactcgaccaggtcgaggtcgccctcccgctggacctgtccggcgaactcaaccggtgtgcctccgtgttgggcgtcaccatcaacaccttggtccagggcgcctgggcgctgctgctcggtcagctcaccggccgccaggacctggtgttcggcgccaccgtctccggtcgtccgcccgccgtgacggacgtcgagacgatggtcgggatgttcatcaacaccctgcccgtacgcgtggagtacgcgcccggcgacaccctcgccgaggtcctcacccggctgcagagccggcaggccggcctggtggagcaccactactacgggctcacggagatccagcagtccgtcggcctgcagaacctcttcgacacgctggtcgtcttcgagtcgtacccggtcgaccgggacggcctcagctccgccaccgacgccgcggacgggatcgccatcaccggtctgcgcccgtccaacggcacccactacccactggctctgatggcggcggtcgacacgcacctccagttcctcctccagtacacgcccggtgtcttcgaccgggacacggtggaggcgtacgcggcccgattcgtgcgcatcctggaacagctggcggccacccccgaactgaagaccgcgcagctcgatgtcctggagccggccgaacgcgaccgactcctcgtcgagttcaacgacacggccgtcccgactccggacgtctcggtcaacgcgctcgtcgaggcacaggcggcgcggaccccggacgaggtcgccgtggtcgccgagggcgagtcgctcacgtaccgcgaggtgaatgcccgggccgaccgcctggcgtgcgaactggccgcccgcggggtgggcccggagtcgatggtcgcggtgtcgctgccgcggtcggcggacctggtggtcgccctgctcgcggttttgaaggcgggcggcacgcatctgccggtcgatcccaggtaccccagccaccgcctcgcggccatcttcgaggaggcgcggccgcacctcgtgctgacggaccaggcgacggtcggcgtgctgccggagcacgacgccccggatgtcctcctcggctcactcgacctgtccggagacgtcaccggtctcgaaatcccgtcccacgcggatcagttggcgtacgtgatgtacacctccggctccacgggcaagcccaagggcgtcgccatcacccacggatgcgtggtcaacgccgtgctgcggctcgcccccatcgtcggcatggagccgggcaagcggctcctcgcggccgcgtcggtcaacttcgacatctcggtgttcgagatcttcacgaccctcgccaccggcggcgtggtcgacgtggtccaggacgtgctggtcctgggcgaccggaagggctggagcggcagcgtcatccacaccgtgccgtccgccttcgccgaactcgtcgacgacatcgccgaccgcaccagcgtggaaacgctcgtcttcgccggcgaggccctgccctcgtcgctcgtcgagaagacgcgggatgccttcccgggcgtacggatcgtcaacgcctacgggcagaccgagtcgttctacgccaccaccttcaccgtcgacggtgagaggccggtctcggcgggcagcgcgcccgccggcgccccgctgggcaacaatcgggcctacgtcctcggccccggcctgactccggtgccgccgggcgcggtcggcgagatatacatcggcgggaacgtggcccgcggctaccacggccgcgccgcgctgaccgccgagcgcttcgtccccgacccgttcggcccgaccggtgcgcgcatgtaccgcaccggtgacctgggccgtttcaatggcgagggccagctggagtacgtgggccgcggggacgcgcaggtcaaggtgcgcggcttccgcgtcgagcccgccgaggtcgaggccgcgctcagcgcgcaccccggcgtcgcgcagaccgccgtcatcgcccgcgacggccgcagcaccggcaagcaactggtcgcgtatgtcgtgcccgccgtcaccggcgacagtacgacgaccggtgaccctcgtggcccggagacgaaggagctgcacgacttcgtcgcggagcggctgccggacttcatggtgccgtccgccttcgtggtcctcgaccggctgccgctcgcgacgaacggcaagctggaccgggccgcgctgcccgagccggagtacaccggcgccgcctaccgggcgccccgcaccgcccgtgaggagtccctggccgcgctgttcgccgaggtgctcggcgtggaccgggtcggcatcgacgacggtttcttcgagctcggcgggcactccctgctcgccacccggctgatcagccgggcccgcgccgagatggggatagagatacccatccgcaagatcttcgacctgccgacggtggccgcgctcgccgcgtggtcggaggaatcggctgctccccgtcgccccggcctgcgcaagatgttcgtagaggagtag

SEQ ID NO: 16 - DNA, 3813 bp, Streptomyces griseochromogenes
atgattccgctgtcattcgcacaacgccgtatgtggattctgcaccagatggagggcgggtcggagaactggaacatgccggcggccttccggctgaccggtgccctggaccaggccgccctcaccgcggcgatccgcgacgtggtcgaccggcacgagaccctgcgcaccgtctacgagacgaacgacgacggtgagctgtaccagcggatcctcccgacagcggaggccacgcctgaggtgccggtcatcgaggtggcgcccggggacgtgtccggcacgatcgaggaggccttcgggtaccggttcgacctggcggccgaacccccgctgcaggtacgcctgttccgctgctcaccccaggagcacgtcctggtcctggtcatccaccacatcgccacggacggcagctcggtcgcgcccctggtgcgggacctggccgcggcctacaccgcccgccgggacggccgggcgccggcgtgggagccgttgcccgtgcagtacaaggactacacgatgtggcagcgtgagctgctcggcgacgtggcggacccggacagtctcgccgcggcgcaggtcgcgtactggcgcaaggaactggccggggtgccgcagccgctgaacctgccgctggaccgcccgcggcccgtccaggcgagcgggcgcggctccacggtcggcctcatggtggagccggaggtggcgagcgggctgcagaagctggccgacgagcgcggggcgaccatgtcgatggtcctgcacgccgcactggcggtgctgctgcgcaagctcggcggcggggacgacgtgacgatcggcagctcgatcgccgggcggaccgaggaggcgctggccgatctggtcgggttcttcgtcaacacccaggtgctgcgggtggacctctgcggtgacccgtcgttcaccgatcttctcgcccaggtgcgacacaagtcgctggcggcctacgagcaccaggacgtgccgttcgacatgctggtcgaggcgatcaaccccgaacgctccgcggcctaccagccgctgttccaggtgatgctcggcctgcagaactacgagaggccggaactcgaactcgccggactcacgttggaggtcgagcagaccatcccctcgacctccaaggtcgacctgttcttcaacatgatcgtggacgactcgggggcgctgcggggcgacatctcctacgcgacggacgtgttcgaccgggagacggtcgaagccttcggggctcggttcgtgcgtgtcctggagcaactggtcggcgatccgggtatgtgcgtcggggatgtcgacgtgctgagcccgggggagcggcagcggctggtggtggaggtgaacgacaccgccgagccgaccctggagctggtggaggcggtgcgcaggcaggtgagggcgacaccggaggctctcgccgtcatcggcgaggaggagtcactcacctaccaggagctggaagcgcggtcgaacaggctggcgcactggctggccgacctcggtgtgcgggcggagtcgcgggtcgccgtgtgcctgccccggaccgtgaacctggtggtggcgctgcttgcggtgatcaaggccggtggagcctacgttccgatcgatccggaacacccgcgttcccggatcgactacatcctcgagcacgcggatccgctgctggtgctcgacgccgaggcgctggccggtgtggattggccggcgtatccggatgcggcaccggaggtggtcgtccggccggagaacgcccagtacgtgatctacacgtcggggtcgacgggcaagccgaagggcgtggcgatcccgcgcggcgcggtggcgaactacctggccacgacacagcggcggttcccgctgtcgtccgcggaccggatgctgttcagcacgacggtggccttcgacatggcgaacaccgagctgtacctcccgttcaccgccggcgcgaccatggtgatggcgggcaaggacaccgtcaccgacccgtcggccgtgctggagttgatacgccgccacggggtcaccgcggtgcaggccacgcccgccttctggcagatgctgttgatgcacgacccgaacgccgcgaagggtctgcggatcatcatcggcgcggaggccgtgccggtacgcctggccgagaccttggcgaagcaggccgccgaagtgttcaacatgtacggcccgaccgagacggtgacgtggtgcaccgaggcgcgcgtggaggtggggcagggtgcgccgatcgggaggccggtcgggaacacccaggtgtacgtgctcgactcgcggctgagcccggtttcgcgcggggtaccgggcgaactgtacatcgccggtgccgggatggcccgcgggtaccagggtcggccggagctgaccgcggagcggttcgtggcgtgcccgttcggtccggccggcgcgcggatgtaccgcaccggggacctcgtgcgctgggacgggaacggtcagctggagtacctcgagcgcacggacttccaggtgaagatccggggtttccggatcgagctcggggagatcgagcacgtgctgaccgggcatcccggcgtggcccaggcggcggccgtggtgcgggagaaccaggacggagacaagcgcatcgtgggttacgtgatacctgagcccgatgcctcgcaggccgacggcggtgtccaggcgctgctcgccgagctgcccgcctacctgcgggggcgtctgccggactacatgatgccctccacgctgatcccgctctcggaggtcccgctgaccccgaacgggaagctcgaccgcggagcactgccgtccgaggacatcaacgccgcggtcagtcgagagccgcgcaactcccacgaagagaggatgtgcgccctcttcggcgagctgctcggcatcgagcgggtcggtatcgacgacgacttcttcgagctgggcgggcactcgctcctggccacccggctcagcgctcgcatccgcggcgagttcgacatcgagatgcccctcaggacgatcatcaagtaccccacggcgggcgagttggccgcgctgttgctcgtcaccactcccgcggagtcctccgacccgctcgcggtcgtgctgccgttgaacagcgatcccggtacgggcaagccgccgctgtggttcttccacggaggaggcggcctcggctggacgtacttcagcttcgcgtcgtacgtgccggactggcccgcctatgccctgcaggcccgtggctccgacggcgtggacaagctggcggggtcggtgaaggagatggtcgaggactacgtcaccgagatgctgaagatccagccggaagggcccttccacctgatcggctggtcctacggcggcacggtcgtgcaggccgtcgcggaggcgctcgaccggcgtgggcacgagatcgccttcgtggccatcctggactcccagccgggtgggcacgggttcacggagatccatgccggcaaggccctgccggactaccggtccgaactcgaggaattcttcggccagtacatcggtaccgacaaccggcaagacttcctggacgccatggcgaaggtcctggccaacaaccacaccctcatgatggatttcgaatcgccggtctaccggggcgatgtgctgttcttcagcgcgacccttcaggaacgttcgtacgcgcatctgtggcggccctacgtcctcggttccatcgaggtgcacgacgtgcgtgccacgcaccacgaaatgaacatgcccgcggccgtggccgaggtcatggaggtcatcaagcgcaagctggcggagctgacggaatga

SEQ ID NO: 17 - DNA, 3231 bp, Streptomyces griseochromogenes; identical to SEQ ID NO: 7

SEQ ID NO: 18 - DNA, 3051 bp, Streptomyces griseochromogenes
atcgccgtcgtgggtatgtcgtgccgtctgcccaaggcccgcaatcccctcgccttctgggaactgctgcgcgacggcaggagcggcatcaccgacgtgccggccgaccgctgggacgcgcaccggctgctcgcggcggacgtcacggctcccggcaaggtcaccaccacgcgcggcggcttcctggacgacatcgccggtttcgacgccgacttcttcgggatcgccccgaacgaggccgcgatgatggaccctcagcagcgtctgatgctggaactcggctgggaggcgctggaggacgccggcatcgtccccgagcacctcgcggggacccgcacgggcgtcttcgtcggcgccatctgggacgactacgcggtccggctctacaagcacggcacccggcgcatcgaccgccactccgtgaccggactccaccgcagcatcatcgccaaccgcctttcctacacgctcggcctcaacggccccagcctcgccgtcgacgcggcccagtcctcgtcgctggtgtccgtgcacctggccgcggagagcctccgcgccggagagtgcacgctcgcgctcgcgggcggagtcaacctcacgatcgtccccgagagcaccatcggctcgaccaagttcggcggcctgtcaccggacggactgtgcaagaccttcgacgcccgggccaacggctacgtccgcggcgaaggcggcgcctacctggcgctcaagaccctgtcccgggcggtggcggacggcgaccggatctactgcgtgatcgagggcagcgccgtcaacaacgacggcgccacgcccggcctcacggtgcccagcgcacgcgcccaggaggaggtcatccgccgcgcgcacgaccgcgccggaacccgtcccgaggacgtccagtacgtcgagctccacggcaccggcacgcgcgtgggcgaccccatcgaggcggccgccctgggcgccgcactcggcaccgggcgccccgccgacgccccgctgcacgtggggtccgcgaagaccaacgtcggccatctggagggcgcggcgggcatcgtcggcctgctcaagaccatcctcagcatctggcaccgcgagctgccgcccagcctcaacttcgagacacccaaccccgacatcgccttcgacgaactccgcctgcgtgttcagcaggacctcacctcctggccccggcccgaccgcccactgatcgccggcaccagctccttcggcatgggcggtaccaactgtcacgtcgtactgcgtgagtggacggtcgacgactgtgcgtccgtgcaggacggaccggccgtcgtgacggacgggacggtgccgtggctggtgtcggcgaagtcgcgggcggcgctggaggagcaggcgcggcggctccttgaccacctggaccggcacccgcgggaaacgcccgctgaagtcggtcatgcgctggcggtgggccggtcggtgttcgatcaccgggcggtggtggtcggccgtgaaccggccgacttccggggcgcgttgagcgcgctggccgagggggagccttccgcgcaggtggttacgggtgcggtggccgcccgacccggcaagacggtgttcgtcttcccggggcaggggtcgcagtgggtcggtatgggcgtggagctcatggcgtccagccctgtcttcgccgaacacctgaccgcctgtgcggcggcgctggagccgtacaccggctggaacctcatcgacgtcctggcccaggcgcagggtgcccccgcgcttgagggcgacgatgtcatccagcccgcgctgtgggcggtgatgatctccctggcgcggctgtgggagcacctggggatcactccggacgcggtggtggggcactcccagggtgagatcgccgccgcgcacatcgccggcgtgctgtcgctggaggactccgcgcgcatcgtggcgttgcgttcgcaggctctcgtccagatcgcggggcacggcggcatggtttccctgccgctgcctttggccgatgcttcggagctgatcggacggtgggaggggcggctggtcgtcgccacggtcaatgggccgtcggccacggtggtggccggtgatacggacgcggtcgaggaactgcgagctcattgcgagaaggagggcttccgggctcgtcgtgtcccgatcgactacgcctctcacacgtctcacgtgcaccctcttcgcgaccgattgctggatgtcctggcgccgatcgagccgcgagaggcgagcatcgcgttctattccactgtcgccggtcatctgggcgggccgatggccgatgccacggtgatggacgcccggtactggtacgacaatctggccaccgccgtgcacttccaggccgccaccagcgctctgctggacgacgggcacacgctgttcatcgaggccagcccccaccccgtcctcacccaccccctgcaggagaccgtcgaggatcacgcgagcggtggcgaggtcgtcgtcaccggcaccctgcgccgggacgacggcacctggcagcgcgtgctgacctccctcgccaccgtccacacccacaccatcgcccccgtcgactggtcgggcttcttccccgccacccggcccacccacctcgacctgcccacctaccccttccaacggcgacgtcactggatcgacctgccgacggacggcgttgccgacgccgattccgacgcgtccgtcgatgtggtcgccgacgtggtcgccgaccggcccgaggacacggctccccctgccgagtccggcgcgtcgtcgccgctcctcgaccgcctcaggaaggcttcccggacccagcgggaacagatcctcaccgaccggatccgtgccgaggtcgcggccatcaccggacgtgtcacctcggagacggtggacggcgaccgcacgttcaaggacttcggtttcgactccttcgcctccgtcgaactgcggaaccgcctgagtgccctcaccggcctgaagttgccgacgacgctgctcttcaaccacccgacccccaccgccgtcgcccgctatctccggaccgaactc

SEQ ID NO: 19 - DNA, 5340 bp, Streptomyces griseochromogenes
atcgcgatcgtgggcatggcctgccgttatccaggagacgtccgcgcccccgaggacctttggcgcctcgtcagcgagggcgtcgacgccatcaccgacttccccgccgaccgcggctgggacaccgagaagctcctcgatcccgacccggaccgacccggtacgtcgtatgtcaccaagggcggattcctgtccgaagcggcggcgttcgaccccgcgttcttcgggatcggcccgcgcgaggcgacggcgatggacccgcagcagcggctgctcctggagacctcctgggaggcgatcgagcaggcgggcatcgacccggccgcgctgcgcggcagccagaccggcgtgttcgtcggcgccatgacccaggagtacggcccccacctgcacgacggcgtcgccgggttcgacgggtacctcttgacgggcaacaccgcgagcgtcgcctcgggccgcatctcgtacaccctcggtctgcagggcccggccgtgacggtggacaccgcctgctcctcctcgttggtctcgatgcacatggcggcccaggcgctgcgcaacggcgagtgctcgctggccctggcgggcggcgtcgccgtcatggccacgccgggcatgttcgtggagttcagccggcagcgcgggcttgcggcggacgggcggtgcaaggcgttcgccgaggcggcggacggcacggcctgggcggagggcgtgggcctgctgctgctggaacgcctctccgacgcgcggaggaacggccatcaggtgctggcggtcgtacgcggctcggcgatcaaccaggacggcgcgagcaacggcctgaccgcccccaacgggccctcgcaggagcgcgtgatacgccaggccctggccggcgcgggcctgtcggcgcaagaggtcgacgtcgtcgaggcccacgggaccgggaccgccctcggcgacccgatcgaggcgcaggcgctgatcgccacctacggcaaggaccggcccgaggaccggccgctgtggctgggctcgctgaagtcgaacatcggccactcccaggccgcggcgggcgtgggcggcgtcatcaagatggtcatggccatgcgtcacggcgtcctgccccagaccctccatgtggaccagccgtcctcgcacgtggactgggccgaaggagcggtggaactcctcaccgagaaccggacctggccggagagcgaccacccgcgacgggccgccatttcgtcgttcggtatcagcggcaccaacgcccatctcatcgtcgagcaggctccggagggcgagggtgccgccggtgagggtgtgccggagccggtggtggtgacggacgggacggtgccgtggctggtgtcggcgaagtcgcgggcggcgctggaggagcaggcgcggcggctgctggaccatctggatcgtcacccggaggcgacgcccgtcgagatcggtcacgcgctggcggcgagccgctccgtgttcgatcaccgggcggtgctggtcggccgtgaaccggatgatttccggggtgcgttgacggcgctggccgctggtgagccctcggcccgagtggtcgccggtacggctgcggcgcagccgggcaggacggtcttcgtctttcccgggcagggctcgcagtgggccggtatgggtgtggagctgatgcggacctcgccggtgttcgccgagcacctgaccgcctgcgcggcggcactggagccgcacaccggctggaacctggttgatgttctggcccaggagcagggcgctcccgcccttgagggcgatgcggtcatccagcccgctctgtgggcggtgatgatttccctggcgcggttgtgggagcacctggggatcactccggatgcggtggtgggtcattcgcagggtgagatcgccgccgcgcacatcgccggtgtgctgtcgttggaggactccgcgcgcatcgtggcgttgcgttcgcaggctctggttcagatcgcgggccgcagtggcatggtgtctttgcctctcccttcggccggtgcctccgagctgatcggccggtgggaggggcggttggtcgtggccacggtcaacgggccgtcggccaccgtggtcgccggtgacatcgccgcggtcgaggagctgctggctcactgtgagagcgagggtcttcgggcccggcgtgtcccgatcgactacgcctctcacacgtcgcatgtgcacccgctgcgtgagcagttgctggacaccctcgcttctgtcgaggcgcgcgcggccactgtcgcgttctattccacggtggccggtcatctgggcgggccgatggccgatacgacggtgatggacgccgagtactggtacgacaatctggccaccgccgtgcacttccaggccgccaccagcgcgctgctggacgacgggcacacgctgttcatcgaggtcagtccccaccccgtcctcacccaccccctccaggaaaccgcggaagaccacccgacgggcgagcggaccctggtcaccggcaccctgcgccgcgacgacggcacctggcagcgcgtgctgaccgcgctcgccaccgcccacacccacaccaccacccccgtcggctggtcggacttcttccccgccacccggcccacccacctcgacctgcccacctaccccttccagcaccagcgttactggctggagcggcccgagagcgcgggggacgcggccgcggccggacaggtgggggtcgaacacccgctgctcggtgcggcggtggagctggcgggcacggatgtcaccgtgctgaccggtcggttgtcgttgcagacgcacggctggctggccgaccacacgatctccggcaccgttctgctgcccggcacggccttcgtcgagatggcgctccgcgcgggtgacgaggtgggcgttgaccaccttgaggaactcgccctgcaggcaccgctcgtcctgccggcgaccggtggcgtccagctgcgcgtggaggccggtgagctcgacgacaccggacggcgttccgtgagcgtgtactcccggcccgacggccaggggacaggtgtgccctggacctgccatgccaccggcgtgctcgccaccagtggcccggcgccgtcctcatgggatccccgggtgtggccgccggccggggcggtgccggtggagaccgatgagctgtacccgtcactggccgtcctcggctatcagtacggccccgcattccagggggtgcggacggtgtggaagcggggcgacgaggtgtacgccgaggtggtgctgccgcaggagcggcacgccgaagtggccgccttcggcatccatcccgcgctgctggacgcggccctgcacgccgggctcgtcccggacccggtggccgggtgggaaccggagccgccgaggctgccgttcgtgtggtccgacgtgcggctgcacgcgaccgacgccacgaacgtgcgggtgcggctggccccggcgggccacgacgccctcgtgctggaggtcgccgacaccgagggcgcgcctgtcgcgtcggtcggttccttgatgatgcgtcccgctgaccccgcgaagctgggcggggcccgggacgggcaccacgacgcgctgttccgcatggaatgggtgagccgggcggtgcgggttgccgacgggaccccggtcggcccgtgggcgctggtgggcgacgacggactggggctcggcaccgttctggacgccgcacagatgcgtcgctacgcagacctgaccgcgctcaccggcgagttcgaggaactcgccaccaccgactccgcagacactttcgacgactcccggcccgaactcgtcctgttctgccacctgcccggggaaggcgccgcctccggcgatcctgccgccgcccgcgtcgagctgttcaaggcgctgtccctggtgcggtcgtggctcgccgacgagcggttcgccggcacacggctggcggtggtcacccgtggcgcggtggcggccgacgacgcggagcagccggacctcgcctccgcaccggtgtggggcctgctgcgcaccgcgcagacggagaacccggaccgtttcgtcctcgtcgacgtcgatgaggacgagcgttccctccgcgccctgcccgccgcgctcgcctgcggtgagccgcagttcgcggtgcgcgggggagaggtcctggtgcctcggctcgtccgggccgggtccgcggccgacggcgcgccgacacctccgcgggagcgggcggtggggcggccggacgcgaccatgccgtccgtgtgggatccggagggcacggtgctgatcaccggcggcaccggcacgctgggcgggcgcttcgcccggcacctggtgaccgagtacggggtgcggcggctgctgctggtcagccggcgggggcccggcgcggagggcgccgccgagctggtggagcggctggccgggctcggggcgacggccacggcggtggcgtgcgacgtctccgaccccgaggcgctgtccggcctgctggaggcgataccggccgagcacccgctgaccgcggtcgtgcacacggcgggtgtgctggacgacggcctggtctccgcgctgacgcccgagcggatggacgcggtgctgcggcccaaggcggacgcggcatggcacctgcaccggctcacccagggccgggacctgagggcgttcgtcctgttctcctcggtgatgggcgcgctcggcggcgcggggcagggcaactacgcggcggcgaatgtctacctcgacgcgctggccgcactccgccgggcccagggacttcccgccacgtcgctggcctggggcttctgggacgaacgcagcgagctgacgggggatctggaccaggcggacctggcccggatggcccgcgcgggcctggtgcccctgcggtcggacgaggggctcgccctgttcgacacggccctcgccctgggcgagcccacgctcgttcccgcacgcctggacaccacgcggctcgctaaggacgggaacgggccgctgcccgcggtactcggcgccctggtgcgtccccgtgccgcccggcgtaccgccgcggccggttcggcgggcggcgccacgggcggacagcggttcgccgggatgtccgcggccgacgcggagcgcgagctcatggaggcggtgcgcgcccacaccgcgaccgtgctggggcacgcgacgccggaggcggtccggccggacagcaggttcaaggacatcggcttcgactcgctgtcgtcggtggagctgcgcaaccgcctgagcgcggccttcggcctgcgcctgccggcgacagcggtcttcgaccatccgacgcccgccacgatggcccgccacctgcgcggcgaactg

SEQ ID NO: 20 - DNA, 5283 bp, Streptomyces griseochromogenes
gtggccatcgtgggcatgggatgccggcttcccggcggcgtcacctcccccgaggagctgtgggagctggtcgcgtccggcagccacgggatctcggggctgccgaccgaccgcggctgggacgtcgacgggctctacgaccccgaccccgaccggcggggcaagagctatgtccgtgaggcgggcttcctctacgacgcgggcgagttcgacgccgacttcttcggtatcgcgccccgcgaggcgctggccatggacccgcagcagcggctgctcctggagaccacctgggaggcgttcgagcgtgcgggcatccgcccggagtcggtgcacggcagccggacgggcgtgttcgtgggcgccatgccccaggagtacggccctcacctgcacgatgccaccgagggactggacggcctgctgctgaccggcaatacgaccagtgtgctctccggccgcctcgcctacttcctcggtcttgagggcccggccctcaccatcgacacggcgtgttcgtcgtccctggtggcgctgcaccaggcggcgcatgcgctgcgccagggggagtgcaccctcgcggtggccggcggcgtggccgtgatggccactccgggagtgctcaccgagttcagcaggcagcgcgctctcgcgcccgacggccggatcaagtcgttcgcggcctccgccgacggcacgggctggagtgagggcgtcggaatcctcctcctggagcggctctccgacgcgcggaagaacggccatcaggtgctggcggtcgtgcgcggctcggcggtcaaccaggacggcgcgagcaacggcctgaccgcccccaacgggccttcccaggagcgcgtcatccgccaggccctggccaacgcccggctcaccccggacgaggtcgacgtggtcgaggcgcacggcacgggtaccaagctgggtgacccgatcgaggcgcaggcgctgatcgccacctacggtcagaaccggcccgaggaccggccgctgtggctgggttcgctgaagtcgaacatcggccacagcatggcggccgccggcgtctccggtgtgatcaagatggtgatggccctgcggcacggggtactgccccgcacactgaacgtggacgagccgaccccgcacgtcgactggcccgcgggcgcggtggagctgctcaccgaggagcggtcctggccggacccgggacgcccgcgccgcgcggcggtctcctccttcggtatcagcggcaccaacgcccatctcatcgtcgagcaggctccggaggacaccggcgtcacccgtgagggtgtgccggagccggaggtggtcacggacgggacggtgccgtggctggtgtcggcgaagtcggaagccgcgctggcagagcaggcgcgacgtctcctcgaccacctcgaccgtcaccctggggtgacccccgccgaggtcggccacacgctggcggccagccgttcggtgttcgatcaccgggcggtgttgatcggccgtgaactggccgaccaccgaggcgcgttgaccgcgctggccgctggtgagccctccgcccgggtggtcaccggcacggtggcggcgcagccgggcaggacggtcttcgtctttcccgggcagggctcgcagtgggccggtatgggtgtggagctgatgcgcacctcgccggtgttcgcggagcacctcacggcgtgcgcggcggcgcttgagccgcacaccggctggagtctcatcgacgtcctcgaccagacgcagggcgccccagatctcgaccgcgtcgacgtcatccagcctgcgctgtgggccatgatgatctccttggcccggctgtgggagcacctgggcatcaccccggacgccgtagtgggccactcccagggtgagatcgccgcggcgcacatcgccggtgtgctgtcgctggaggactccgctcgcatcgtggccttgcgctcccgggccatcacccacatcgcgggcgacggcgggatggtctccctgccccttgccgtggcggacgccgaggaactcatcgcccggtgggaggagcgggtggtcgtggccgcggtcaacgggccgtcggccaccgtggttgccggtgacgccgacgcgctggcggagatcgtcacccactgcgagggcgaggacatccgggcccggaagatcccggtggactacgcctcccactccccgcacgtcgaggcgctccacgacgaactgctggagctgctggctccggtgcgcccgcgggaggcggaggtggcgttctactcgacggtgggcgaccacgccaagggcgcgatgagcgacacgacggcgatgggtgcggcgtactggtacgagaacctgcgcaccaccgtggccttcgaggcggccgcccgcgccctgctggacgacgggcacaccctgttcgtcgaggtcagcccccacccggtactcacccaccccctccaggagaccgtcgaggaccacacgggcgccggcgaggtcgccgtcaccggcaccctgcgccgcgacgacgacacctggcagcgcgtgctgaccgcgctcgccaccgcccacacccacaccaccgcccccgtcgactggtcgggcttcttccccgccacccggcccacccacctcgacctgcccacctaccccttccagcaccagcactactggatccagcagaccaccaccgcgaccgatccccacaccctcggcctgcacgccgccgaccacggcctgctcggtgccgccgtcgccctcgcggacggcgacggacacgtgttcacagggcacctgtcgctgcgcagccatccctggctggccgaccacgccgtccacgacacgtccctcctgcccggcaccgcgttcgtcgaactggccctccacgccggtcaggccaccgacaccccccacctggaagacctcaccctcgaagcccccctcaccctcccggccaccggcggcctccacctgcaggtgcacgtggccgcatccgacggcgacggccaccgggccctcaccatccactcccgacccgacgacgccacccccgacctgccctggacccgccacgccaacggcactctcgccccccagccgtccggcgcgccggacccggccgagtgggcggaactcgcggcctggccgccggccggcgccactcccgtgcccgccggcactctctacgaccatctcgccgaccgcggctaccgctacggcaccaccttccagggcctgaccgccgtctggcgccagggcggcgccctctacgccgaagtcaccctctccgacgacaccgacaacgccaccgccgccgaccactacggcatccaccccgcgctcttcgacgccgcgctccacccgatcgtcggcgccggccccgagcaggactcggaccaggtgctgctgccgttcgcctggtcgaacgtccagctgcacgccgtgggcgcccgggccctgcgcgtccagatcagccctgctgacgcggggacgctgcgcgtcaggctcgccgatcccaccgggcagccggtcgccgaagcggcatcgctggccctgcggcccatcaccaccgagcagttggcgaaggccgttgcggcgggaggagacgaccacctgttccgcctggcctggacccccgcgtccgtcacggaggagctcaagaccggccgtgtggcgttcctgggagccgccgttcccgaggcactggtcacatcgctgcccggcgatgtcgcggtcgagcgccacgagaagctggcaccgctgctggcggacgacaccgctctcctcccggacctggtcatcgcgactggcctgctggagcgttcccactcgggcgaggacgtccccggccccgcgcgcgaggccgtccagtacgccttggacctggtccaggagtggttggccgaggagcggctggccggcagccggctcgtgttcgtcaccaggcgagccgtcgcggtccatgccgacaccgagtcgcccagccccgcggacgccgctgtctggggcctgatccgtacggctgaggccgagaatccgggccgcttcaccctgatcgacctggcggacgagaaggccatcgcatccgagtcgttccgcgcggcgttgggaagcggcgaaccgcaggtggccgtgcgtgacggcgatcagcggctgtacgtcccccggctcgtacgggaggtgcagcccgacgacaccgccgtaccggagcccgccgcgggcggcacggtgctgatcaccggcggcacgggcaccctcggcacactgttcgcccgccattacgcgacggctcggcaggccggccatctgctgttgaccagccgacgcggcccggacgctccgggcgcgcgcgaactcgccgccgaactgaccgaactgggtgtgaaggtgaccgtcgtcgcctgcgacaccgccgaccgcggcgccctcgccgcgctcctcgcggccgtccccgacgaacaccccctcaccgccgtcgtgcacaccgccggcgtcctcgacgacggcaccatcacctccctgacggcggaacgcgtcgagcgcgtcttccgcccgaaggtcgacgccgcctggcacctgcacgagctcacccgcgagagcgacctcaccgagttcgtcctcttctcctccgcggcgggcgttctgggcacgccgggccagggcaactacgccgcggcgaacgtcttcctcgacgcgctggccgaacgccgtcgcgccgacgggctgcccgccacctccctggcctggggactgtggtccgacagcagcggcatgaccggccacctggacgacgtggacctgacccggatggctcgcctcgggatcaagcccatcacggcggaggaaggggtggcgttgttcgaggcggcccgtgccacgggcgccgcctgcctggtccccgccaagatcgccccagccctgctccgtccccacttggagaccggcactcttcccgccgtcctccagggcctggtgcgcgctcccgtccgcaaggccaccgtggccacggcgaccgacggcgccaccctccgcgatcgcctggcccacctgtcaccagaggaggccgaggacaccctcgccaccctcgtccgcacccacgtcgccctcgtcctgggccacgacacgtccgacaccatcagtctcgacaaggcgttcaaggacctcggtttcgactcgctgaccgcggtcgagctgcgcaaccgtctggcgtcctcgaccggactgagcctggcagccaccctcgtcttcagctacccgaccccacgtgaactggggcggcacctgcacgacctg

SEQ ID NO: 21 - DNA, 2967 bp, Streptomyces griseochromogenes
atcgccgtggtggccatggcctgccgctacccggggggcgtgtcatcgcccgaggagctgtggaatgtcgtccgcgacggcctggacgtagtgggcgagttcccgcaggaccgcgggtggcgggacatcttcgacccggatcccgacacgctcggcagctcgtacacgcggcacggagggttcctgacggacgcggccgccttcgacgcggggttcttcggcatcagtccgcgtgaggcgctggcggtcgatccgcagcagcgcttgctgcttgagacgtcatgggaggtcttcgagcgggcgggcatcgtgcccgccgatgtgcgcggggccgacgtcggggtcttctccggcgtgagctccgccgagtacgggacgcgtttcgtggaggcgagcgggcacgacctggagggctacctgctgcaaggcagcgtgctgagcatcgcctccggccgagtggcctacgaattcggcctgaccggaccggcggtgagcgtggacacggcgtgctcgtcttcgctggtggccgtgcacctggcgatgcagtcactgcgctcgggggagagctcgctcgcgctcgcgggtggggcggcggtgatggcgacgcccgcgctcttcgtggagttctcccggcagcgcggtctgtccgccgacggccggtgcaggtccttcgcggacgcggccgacgggaccggctgggccgagggcgtgggggtgctgctcctggagcggctgtccgacgcccgccgcaacggccacccggtgctggccgtcctgcgcggttccgcggtgaaccaggacggggccagcaacgggctgaccgctcccaacggccgtgcccaggagaaggtgatccgcaaggctctggcgaacgcgggggtctcggccgccgaggtggacctgctcgaagcccacggcaccggaaccacgctgggggatcccatcgaggcaggcgctctgctggcgacctacggacagggacgggccgagggcaggccgctccggttggggtcgctgaagtcgaacatcggtcactccatggccgccgccggggtcggcggggtgatcaaggccgtgatggccatgcgccaccggtacctgccgaagaccctgcacgtggatcagccctcacgccacgtggactggtcatccggtgcgctcgaactgctgctggaggggcgtgagtggacccgggcgggcggcccgcggcgggccgcggtgtcgtcgttcggcgtcagcggcaccaacgcacacgtcatcctggaagaggccccgcggcaggaacaggcggacgagggcgatccggactcgggcgtcgtcggcggcctcgtgccgtgggcgctgtccggcaagagcgcggcggccgtgcaacagcaggcgcgtaagctgcgcgaattcgccgtcgccgacccgggtctcgatgtcgccgatgtcggctggtcgttgacgtcgagccggacccggttcgggcaccgcgcggtggtcctgggacacgaccgggacgagctgttgagcggcctgacggcgctcgctgccggcgaggagtccgccgcggtggtgcgcggcacggcccgggagctcggcggtacggtcttcatgttcccgggacagggttcgcagtgggtcggtatgggccgtcagttgtacgacaccttccccgtcttcgcgcagagcctcgacgcgtgcgcggccgccttggccgagtgggtcgactggtcgctgctcgacgtggtgcgcggcgtggagggggcaccgacgctggaccgggtggacgtggtgcagccggcgttgttctccgtgatggtgtccatggccgccctgtggcggtcctggggtgtggaaccggccgcggtcgtggggcacagccagggcgagatagccgcagcccacgtctgcggcgccctgtcactgcgcgacgccgccaaagtcgtggcgctccgcagcaaggctctggtggatctgatcggtcacggcgggatggcgtcggtcgcggagtccgcggatgtcgtggcggaacgtctcgctccgtggagcgaccgagtgagcatcgccgtcgtcaacggaccccgctcggtggtggtgtccggggaacccgacgccctcgacgaattcgtcgagaagatgaaggccgaaggcgctcaggcccggcgaataaaggtcgactacgcgtcccattcacatcacgtggcccgggtccgtgaccaggtgctcggcccgctgtccgacatgagcccgaagacgtcgacgctgcccttctactcgaccctgtacggcgaggtcatcgacaccgcgcagctgaacggcgactactggtataccaacctgcgcgagaaagtcgtcttcgaaacgtccgtccgacggctggccgacgacggtttccgggtgttcatcgagatgagtccgcaccccgtgctgaccgtcccggtgcaggagatcgtcgaggacgtggacgacgcggtggtcctgtcgtcgtcgcggcgggatcgcggggaggtggaggccgtgctcggctcgctggccgggctccacgtccagggcgggtccgtggactgggacgttctgttcgggacgcgtcgacgggtggatcttccgacgtacgcgttccagcggcagcgctactggctgaactccgtgcacacgggggtgacggcggaggtgtccgcgctggagccgcccgcggctgacgacgatcccgtcgccctgccggacctgatcgccgacctctccgacgacgaggcgacggcacttgtccttgaccacgtcctcacgaaggtcgccgtcgtgctcggacacccctccagcgaggccgtcgaccccgaccaggaattcaaggacatcggattcgactcgctgctctcggtgcagctgagcaagggcctggccacgacgaccggactcaagctgaggccgaacctggtgctgcggcacccgacaccgaggcgggtcgccgggtacctcaagacctcg

SEQ ID NO: 22 - protein, 1017 aa, Streptomyces griseochromogenes
IAVVGMSCRLPKARNPLAFWELLRDGRSGITDVPADRWDAHRLLAADVTAPGKVTTTRGGFLDDIAGFDADFFGIAPNEAAMMDPQQRLMLELGWEALEDAGIVPEHLAGTRTGVFVGAIWDDYAVRLYKHGTRRIDRHSVTGLHRSIIANRLSYTLGLNGPSLAVDAAQSSSLVSVHLAAESLRAGECTLALAGGVNLTIVPESTIGSTKFGGLSPDGLCKTFDARANGYVRGEGGAYLALKTLSRAVADGDRIYCVIEGSAVNNDGATPGLTVPSARAQEEVIRRAHDRAGTRPEDVQYVELHGTGTRVGDPIEAAALGAALGTGRPADAPLHVGSAKTNVGHLEGAAGIVGLLKTILSIWHRELPPSLNFETPNPDIAFDELRLRVQQDLTSWPRPDRPLIAGTSSFGMGGTNCHVVLREWTVDDCASVQDGPAVVTDGTVPWLVSAKSRAALEEQARRLLDHLDRHPRETPAEVGHALAVGRSVFDHRAVVVGREPADFRGALSALAEGEPSAQVVTGAVAARPGKTVFVFPGQGSQWVGMGVELMASSPVFAEHLTACAAALEPYTGWNLIDVLAQAQGAPALEGDDVIQPALWAVMISLARLWEHLGITPDAVVGHSQGEIAAAHIAGVLSLEDSARIVALRSQALVQIAGHGGMVSLPLPLADASELIGRWEGRLVVATVNGPSATVVAGDTDAVEELRAHCEKEGFRARRVPIDYASHTSHVHPLRDRLLDVLAPIEPREASIAFYSTVAGHLGGPMADATVMDARYWYDNLATAVHFQAATSALLDDGHTLFIEASPHPVLTHPLQETVEDHASGGEVVVTGTLRRDDGTWQRVLTSLATVHTHTIAPVDWSGFFPATRPTHLDLPTYPFQRRRHWIDLPTDGVADADSDASVDVVADVVADRPEDTAPPAESGASSPLLDRLRKASRTQREQILTDRIRAEVAAITGRVTSETVDGDRTFKDFGFDSFASVELRNRLSALTGLKLPTTLLFNHPTPTAVARYLRTEL

SEQ ID NO: 23 - protein, 1780 aa, Streptomyces griseochromogenes
IAIVGMACRYPGDVRAPEDLWRLVSEGVDAITDFPADRGWDTEKLLDPDPDRPGTSYVTKGGFLSEAAAFDPAFFGIGPREATAMDPQQRLLLETSWEAIEQAGIDPAALRGSQTGVFVGAMTQEYGPHLHDGVAGFDGYLLTGNTASVASGRISYTLGLQGPAVTVDTACSSSLVSMHMAAQALRNGECSLALAGGVAVMATPGMFVEFSRQRGLAADGRCKAFAEAADGTAWAEGVGLLLLERLSDARRNGHQVLAVVRGSAINQDGASNGLTAPNGPSQERVIRQALAGAGLSAQEVDVVEAHGTGTALGDPIEAQALIATYGKDRPEDRPLWLGSLKSNIGHSQAAAGVGGVIKMVMAMRHGVLPQTLHVDQPSSHVDWAEGAVELLTENRTWPESDHPRRAAISSFGISGTNAHLIVEQAPEGEGAAGEGVPEPVVVTDGTVPWLVSAKSRAALEEQARRLLDHLDRHPEATPVEIGHALAASRSVFDHRAVLVGREPDDFRGALTALAAGEPSARVVAGTAAAQPGRTVFVFPGQGSQWAGMGVELMRTSPVFAEHLTACAAALEPHTGWNLVDVLAQEQGAPALEGDAVIQPALWAVMISLARLWEHLGITPDAVVGHSQGEIAAAHIAGVLSLEDSARIVALRSQALVQIAGRSGMVSLPLPSAGASELIGRWEGRLVVATVNGPSATVVAGDIAAVEELLAHCESEGLRARRVPIDYASHTSHVHPLREQLLDTLASVEARAATVAFYSTVAGHLGGPMADTTVMDAEYWYDNLATAVHFQAATSALLDDGHTLFIEVSPHPVLTHPLQETAEDHPTGERTLVTGTLRRDDGTWQRVLTALATAHTHTTTPVGWSDFFPATRPTHLDLPTYPFQHQRYWLERPESAGDAAAAGQVGVEHPLLGAAVELAGTDVTVLTGRLSLQTHGWLADHTISGTVLLPGTAFVEMALRAGDEVGVDHLEELALQAPLVLPATGGVQLRVEAGELDDTGRRSVSVYSRPDGQGTGVPWTCHATGVLATSGPAPSSWDPRVWPPAGAVPVETDELYPSLAVLGYQYGPAFQGVRTVWKRGDEVYAEVVLPQERHAEVAAFGIHPALLDAALHAGLVPDPVAGWEPEPPRLPFVWSDVRLHATDATNVRVRLAPAGHDALVLEVADTEGAPVASVGSLMMRPADPAKLGGARDGHHDALFRMEWVSRAVRVADGTPVGPWALVGDDGLGLGTVLDAAQMRRYADLTALTGEFEELATTDSADTFDDSRPELVLFCHLPGEGAASGDPAAARVELFKALSLVRSWLADERFAGTRLAVVTRGAVAADDAEQPDLASAPVWGLLRTAQTENPDRFVLVDVDEDERSLRALPAALACGEPQFAVRGGEVLVPRLVRAGSAADGAPTPPRERAVGRPDATMPSVWDPEGTVLITGGTGTLGGRFARHLVTEYGVRRLLLVSRRGPGAEGAAELVERLAGLGATATAVACDVSDPEALSGLLEAIPAEHPLTAVVHTAGVLDDGLVSALTPERMDAVLRPKADAAWHLHRLTQGRDLRAFVLFSSVMGALGGAGQGNYAAANVYLDALAALRRAQGLPATSLAWGFWDERSELTGDLDQADLARMARAGLVPLRSDEGLALFDTALALGEPTLVPARLDTTRLAKDGNGPLPAVLGALVRPRAARRTAAAGSAGGATGGQRFAGMSAADAERELMEAVRAHTATVLGHATPEAVRPDSRFKDIGFDSLSSVELRNRLSAAFGLRLPATAVFDHPTPATMARHLRGEL

SEQ ID NO: 24 - protein, 1761 aa, Streptomyces griseochromogenes
VAIVGMGCRLPGGVTSPEELWELVASGSHGISGLPTDRGWDVDGLYDPDPDRRGKSYVREAGFLYDAGEFDADFFGIAPREALAMDPQQRLLLETTWEAFERAGIRPESVHGSRTGVFVGAMPQEYGPHLHDATEGLDGLLLTGNTTSVLSGRLAYFLGLEGPALTIDTACSSSLVALHQAAHALRQGECTLAVAGGVAVMATPGVLTEFSRQRALAPDGRIKSFAASADGTGWSEGVGILLLERLSDARKNGHQVLAVVRGSAVNQDGASNGLTAPNGPSQERVIRQALANARLTPDEVDVVEAHGTGTKLGDPIEAQALIATYGQNRPEDRPLWLGSLKSNIGHSMAAAGVSGVIKMVMALRHGVLPRTLNVDEPTPHVDWPAGAVELLTEERSWPDPGRPRRAAVSSFGISGTNAHLIVEQAPEDTGVTREGVPEPEVVTDGTVPWLVSAKSEAALAEQARRLLDHLDRHPGVTPAEVGHTLAASRSVFDHRAVLIGRELADHRGALTALAAGEPSARVVTGTVAAQPGRTVFVFPGQGSQWAGMGVELMRTSPVFAEHLTACAAALEPHTGWSLIDVLDQTQGAPDLDRVDVIQPALWAMMISLARLWEHLGITPDAVVGHSQGEIAAAHIAGVLSLEDSARIVALRSRAITHIAGDGGMVSLPLAVADAEELIARWEERVVVAAVNGPSATVVAGDADALAEIVTHCEGEDIRARKIPVDYASHSPHVEALHDELLELLAPVRPREAEVAFYSTVGDHAKGAMSDTTAMGAAYWYENLRTTVAFEAAARALLDDGHTLFVEVSPHPVLTHPLQETVEDHTGAGEVAVTGTLRRDDDTWQRVLTALATAHTHTTAPVDWSGFFPATRPTHLDLPTYPFQHQHYWIQQTTTATDPHTLGLHAADHGLLGAAVALADGDGHVFTGHLSLRSHPWLADHAVHDTSLLPGTAFVELALHAGQATDTPHLEDLTLEAPLTLPATGGLHLQVHVAASDGDGHRALTIHSRPDDATPDLPWTRHANGTLAPQPSGAPDPAEWAELAAWPPAGATPVPAGTLYDHLADRGYRYGTTFQGLTAVWRQGGALYAEVTLSDDTDNATAADHYGIHPALFDAALHPIVGAGPEQDSDQVLLPFAWSNVQLHAVGARALRVQISPADAGTLRVRLADPTGQPVAEAASLALRPITTEQLAKAVAAGGDDHLFRLAWTPASVTEELKTGRVAFLGAAVPEALVTSLPGDVAVERHEKLAPLLADDTALLPDLVIATGLLERSHSGEDVPGPAREAVQYALDLVQEWLAEERLAGSRLVFVTRRAVAVHADTESPSPADAAVWGLIRTAEAENPGRFTLIDLADEKAIASESFRAALGSGEPQVAVRDGDQRLYVPRLVREVQPDDTAVPEPAAGGTVLITGGTGTLGTLFARHYATARQAGHLLLTSRRGPDAPGARELAAELTELGVKVTVVACDTADRGALAALLAAVPDEHPLTAVVHTAGVLDDGTITSLTAERVERVFRPKVDAAWHLHELTRESDLTEFVLFSSAAGVLGTPGQGNYAAANVFLDALAERRRADGLPATSLAWGLWSDSSGMTGHLDDVDLTRMARLGIKPITAEEGVALFEAARATGAACLVPAKIAPALLRPHLETGTLPAVLQGLVRAPVRKATVATATDGATLRDRLAHLSPEEAEDTLATLVRTHVALVLGHDTSDTISLDKAFKDLGFDSLTAVELRNRLASSTGLSLAATLVFSYPTPRELGRHLHDL

SEQ ID NO: 25 - protein, 989 aa, Streptomyces griseochromogenes
IAVVAMACRYPGGVSSPEELWNVVRDGLDVVGEFPQDRGWRDIFDPDPDTLGSSYTRHGGFLTDAAAFDAGFFGISPREALAVDPQQRLLLETSWEVFERAGIVPADVRGADVGVFSGVSSAEYGTRFVEASGHDLEGYLLQGSVLSIASGRVAYEFGLTGPAVSVDTACSSSLVAVHLAMQSLRSGESSLALAGGAAVMATPALFVEFSRQRGLSADGRCRSFADAADGTGWAEGVGVLLLERLSDARRNGHPVLAVLRGSAVNQDGASNGLTAPNGRAQEKVIRKALANAGVSAAEVDLLEAHGTGTTLGDPIEAGALLATYGQGRAEGRPLRLGSLKSNIGHSMAAAGVGGVIKAVMAMRHRYLPKTLHVDQPSRHVDWSSGALELLLEGREWTRAGGPRRAAVSSFGVSGTNAHVILEEAPRQEQADEGDPDSGVVGGLVPWALSGKSAAAVQQQARKLREFAVADPGLDVADVGWSLTSSRTRFGHRAVVLGHDRDELLSGLTALAAGEESAAVVRGTARELGGTVFMFPGQGSQWVGMGRQLYDTFPVFAQSLDACAAALAEWVDWSLLDVVRGVEGAPTLDRVDVVQPALFSVMVSMAALWRSWGVEPAAVVGHSQGEIAAAHVCGALSLRDAAKVVALRSKALVDLIGHGGMASVAESADVVAERLAPWSDRVSIAVVNGPRSVVVSGEPDALDEFVEKMKAEGAQARRIKVDYASHSHHVARVRDQVLGPLSDMSPKTSTLPFYSTLYGEVIDTAQLNGDYWYTNLREKVVFETSVRRLADDGFRVFIEMSPHPVLTVPVQEIVEDVDDAVVLSSSRRDRGEVEAVLGSLAGLHVQGGSVDWDVLFGTRRRVDLPTYAFQRQRYWLNSVHTGVTAEVSALEPPAADDDPVALPDLIADLSDDEATALVLDHVLTKVAVVLGHPSSEAVDPDQEFKDIGFDSLLSVQLSKGLATTTGLKLRPNLVLRHPTPRRVAGYLKTS

SEQ ID NO: 26 - DNA, 14148 bp, Streptomyces griseochromogenes
gtgggggacgtcgagaacttccggtcctacgcgcgacgcgccgtcggtgacgagcggacgccgcgcgagggggcgcacgagctggaggagtccgcgcgcgagcccatcgccgtcgtgggtatgtcgtgccgtctgcccaaggcccgcaatcccctcgccttctgggaactgctgcgcgacggcaggagcggcatcaccgacgtgccggccgaccgctgggacgcgcaccggctgctcgcggcggacgtcacggctcccggcaaggtcaccaccacgcgcggcggcttcctggacgacatcgccggtttcgacgccgacttcttcgggatcgccccgaacgaggccgcgatgatggaccctcagcagcgtctgatgctggaactcggctgggaggcgctggaggacgccggcatcgtccccgagcacctcgcggggacccgcacgggcgtcttcgtcggcgccatctgggacgactacgcggtccggctctacaagcacggcacccggcgcatcgaccgccactccgtgaccggactccaccgcagcatcatcgccaaccgcctttcctacacgctcggcctcaacggccccagcctcgccgtcgacgcggcccagtcctcgtcgctggtgtccgtgcacctggccgcggagagcctccgcgccggagagtgcacgctcgcgctcgcgggcggagtcaacctcacgatcgtccccgagagcaccatcggctcgaccaagttcggcggcctgtcaccggacggactgtgcaagaccttcgacgcccgggccaacggctacgtccgcggcgaaggcggcgcctacctggcgctcaagaccctgtcccgggcggtggcggacggcgaccggatctactgcgtgatcgagggcagcgccgtcaacaacgacggcgccacgcccggcctcacggtgcccagcgcacgcgcccaggaggaggtcatccgccgcgcgcacgaccgcgccggaacccgtcccgaggacgtccagtacgtcgagctccacggcaccggcacgcgcgtgggcgaccccatcgaggcggccgccctgggcgccgcactcggcaccgggcgccccgccgacgccccgctgcacgtggggtccgcgaagaccaacgtcggccatctggagggcgcggcgggcatcgtcggcctgctcaagaccatcctcagcatctggcaccgcgagctgccgcccagcctcaacttcgagacacccaaccccgacatcgccttcgacgaactccgcctgcgtgttcagcaggacctcacctcctggccccggcccgaccgcccactgatcgccggcaccagctccttcggcatgggcggtaccaactgtcacgtcgtactgcgtgagtggacggtcgacgactgtgcgtccgtgcaggacggaccggccgtcgtgacggacgggacggtgccgtggctggtgtcggcgaagtcgcgggcggcgctggaggagcaggcgcggcggctccttgaccacctggaccggcacccgcgggaaacgcccgctgaagtcggtcatgcgctggcggtgggccggtcggtgttcgatcaccgggcggtggtggtcggccgtgaaccggccgacttccggggcgcgttgagcgcgctggccgagggggagccttccgcgcaggtggttacgggtgcggtggccgcccgacccggcaagacggtgttcgtcttcccggggcaggggtcgcagtgggtcggtatgggcgtggagctcatggcgtccagccctgtcttcgccgaacacctgaccgcctgtgcggcggcgctggagccgtacaccggctggaacctcatcgacgtcctggcccaggcgcagggtgcccccgcgcttgagggcgacgatgtcatccagcccgcgctgtgggcggtgatgatctccctggcgcggctgtgggagcacctggggatcactccggacgcggtggtggggcactcccagggtgagatcgccgccgcgcacatcgccggcgtgctgtcgctggaggactccgcgcgcatcgtggcgttgcgttcgcaggctctcgtccagatcgcggggcacggcggcatggtttccctgccgctgcctttggccgatgcttcggagctgatcggacggtgggaggggcggctggtcgtcgccacggtcaatgggccgtcggccacggtggtggccggtgatacggacgcggtcgaggaactgcgagctcattgcgagaaggagggcttccgggctcgtcgtgtcccgatcgactacgcctctcacacgtctcacgtgcaccctcttcgcgaccgattgctggatgtcctggcgccgatcgagccgcgagaggcgagcatcgcgttctattccactgtcgccggtcatctgggcgggccgatggccgatgccacggtgatggacgcccggtactggtacgacaatctggccaccgccgtgcacttccaggccgccaccagcgctctgctggacgacgggcacacgctgttcatcgaggccagcccccaccccgtcctcacccaccccctgcaggagaccgtcgaggatcacgcgagcggtggcgaggtcgtcgtcaccggcaccctgcgccgggacgacggcacctggcagcgcgtgctgacctccctcgccaccgtccacacccacaccatcgcccccgtcgactggtcgggcttcttccccgccacccggcccacccacctcgacctgcccacctaccccttccaacggcgacgtcactggatcgacctgccgacggacggcgttgccgacgccgattccgacgcgtccgtcgatgtggtcgccgacgtggtcgccgaccggcccgaggacacggctccccctgccgagtccggcgcgtcgtcgccgctcctcgaccgcctcaggaaggcttcccggacccagcgggaacagatcctcaccgaccggatccgtgccgaggtcgcggccatcaccggacgtgtcacctcggagacggtggacggcgaccgcacgttcaaggacttcggtttcgactccttcgcctccgtcgaactgcggaaccgcctgagtgccctcaccggcctgaagttgccgacgacgctgctcttcaaccacccgacccccaccgccgtcgcccgctatctccggaccgaactcctgggctccgaggagtccggcagcatcgcccacggctccccgctcgccgccgccagcgcggacgaaccgatcgcgatcgtgggcatggcctgccgttatccaggagacgtccgcgcccccgaggacctttggcgcctcgtcagcgagggcgtcgacgccatcaccgacttccccgccgaccgcggctgggacaccgagaagctcctcgatcccgacccggaccgacccggtacgtcgtatgtcaccaagggcggattcctgtccgaagcggcggcgttcgaccccgcgttcttcgggatcggcccgcgcgaggcgacggcgatggacccgcagcagcggctgctcctggagacctcctgggaggcgatcgagcaggcgggcatcgacccggccgcgctgcgcggcagccagaccggcgtgttcgtcggcgccatgacccaggagtacggcccccacctgcacgacggcgtcgccgggttcgacgggtacctcttgacgggcaacaccgcgagcgtcgcctcgggccgcatctcgtacaccctcggtctgcagggcccggccgtgacggtggacaccgcctgctcctcctcgttggtctcgatgcacatggcggcccaggcgctgcgcaacggcgagtgctcgctggccctggcgggcggcgtcgccgtcatggccacgccgggcatgttcgtggagttcagccggcagcgcgggcttgcggcggacgggcggtgcaaggcgttcgccgaggcggcggacggcacggcctgggcggagggcgtgggcctgctgctgctggaacgcctctccgacgcgcggaggaacggccatcaggtgctggcggtcgtacgcggctcggcgatcaaccaggacggcgcgagcaacggcctgaccgcccccaacgggccctcgcaggagcgcgtgatacgccaggccctggccggcgcgggcctgtcggcgcaagaggtcgacgtcgtcgaggcccacgggaccgggaccgccctcggcgacccgatcgaggcgcaggcgctgatcgccacctacggcaaggaccggcccgaggaccggccgctgtggctgggctcgctgaagtcgaacatcggccactcccaggccgcggcgggcgtgggcggcgtcatcaagatggtcatggccatgcgtcacggcgtcctgccccagaccctccatgtggaccagccgtcctcgcacgtggactgggccgaaggagcggtggaactcctcaccgagaaccggacctggccggagagcgaccacccgcgacgggccgccatttcgtcgttcggtatcagcggcaccaacgcccatctcatcgtcgagcaggctccggagggcgagggtgccgccggtgagggtgtgccggagccggtggtggtgacggacgggacggtgccgtggctggtgtcggcgaagtcgcgggcggcgctggaggagcaggcgcggcggctgctggaccatctggatcgtcacccggaggcgacgcccgtcgagatcggtcacgcgctggcggcgagccgctccgtgttcgatcaccgggcggtgctggtcggccgtgaaccggatgatttccggggtgcgttgacggcgctggccgctggtgagccctcggcccgagtggtcgccggtacggctgcggcgcagccgggcaggacggtcttcgtctttcccgggcagggctcgcagtgggccggtatgggtgtggagctgatgcggacctcgccggtgttcgccgagcacctgaccgcctgcgcggcggcactggagccgcacaccggctggaacctggttgatgttctggcccaggagcagggcgctcccgcccttgagggcgatgcggtcatccagcccgctctgtgggcggtgatgatttccctggcgcggttgtgggagcacctggggatcactccggatgcggtggtgggtcattcgcagggtgagatcgccgccgcgcacatcgccggtgtgctgtcgttggaggactccgcgcgcatcgtggcgttgcgttcgcaggctctggttcagatcgcgggccgcagtggcatggtgtctttgcctctcccttcggccggtgcctccgagctgatcggccggtgggaggggcggttggtcgtggccacggtcaacgggccgtcggccaccgtggtcgccggtgacatcgccgcggtcgaggagctgctggctcactgtgagagcgagggtcttcgggcccggcgtgtcccgatcgactacgcctctcacacgtcgcatgtgcacccgctgcgtgagcagttgctggacaccctcgcttctgtcgaggcgcgcgcggccactgtcgcgttctattccacggtggccggtcatctgggcgggccgatggccgatacgacggtgatggacgccgagtactggtacgacaatctggccaccgccgtgcacttccaggccgccaccagcgcgctgctggacgacgggcacacgctgttcatcgaggtcagtccccaccccgtcctcacccaccccctccaggaaaccgcggaagaccacccgacgggcgagcggaccctggtcaccggcaccctgcgccgcgacgacggcacctggcagcgcgtgctgaccgcgctcgccaccgcccacacccacaccaccacccccgtcggctggtcggacttcttccccgccacccggcccacccacctcgacctgcccacctaccccttccagcaccagcgttactggctggagcggcccgagagcgcgggggacgcggccgcggccggacaggtgggggtcgaacacccgctgctcggtgcggcggtggagctggcgggcacggatgtcaccgtgctgaccggtcggttgtcgttgcagacgcacggctggctggccgaccacacgatctccggcaccgttctgctgcccggcacggccttcgtcgagatggcgctccgcgcgggtgacgaggtgggcgttgaccaccttgaggaactcgccctgcaggcaccgctcgtcctgccggcgaccggtggcgtccagctgcgcgtggaggccggtgagctcgacgacaccggacggcgttccgtgagcgtgtactcccggcccgacggccaggggacaggtgtgccctggacctgccatgccaccggcgtgctcgccaccagtggcccggcgccgtcctcatgggatccccgggtgtggccgccggccggggcggtgccggtggagaccgatgagctgtacccgtcactggccgtcctcggctatcagtacggccccgcattccagggggtgcggacggtgtggaagcggggcgacgaggtgtacgccgaggtggtgctgccgcaggagcggcacgccgaagtggccgccttcggcatccatcccgcgctgctggacgcggccctgcacgccgggctcgtcccggacccggtggccgggtgggaaccggagccgccgaggctgccgttcgtgtggtccgacgtgcggctgcacgcgaccgacgccacgaacgtgcgggtgcggctggccccggcgggccacgacgccctcgtgctggaggtcgccgacaccgagggcgcgcctgtcgcgtcggtcggttccttgatgatgcgtcccgctgaccccgcgaagctgggcggggcccgggacgggcaccacgacgcgctgttccgcatggaatgggtgagccgggcggtgcgggttgccgacgggaccccggtcggcccgtgggcgctggtgggcgacgacggactggggctcggcaccgttctggacgccgcacagatgcgtcgctacgcagacctgaccgcgctcaccggcgagttcgaggaactcgccaccaccgactccgcagacactttcgacgactcccggcccgaactcgtcctgttctgccacctgcccggggaaggcgccgcctccggcgatcctgccgccgcccgcgtcgagctgttcaaggcgctgtccctggtgcggtcgtggctcgccgacgagcggttcgccggcacacggctggcggtggtcacccgtggcgcggtggcggccgacgacgcggagcagccggacctcgcctccgcaccggtgtggggcctgctgcgcaccgcgcagacggagaacccggaccgtttcgtcctcgtcgacgtcgatgaggacgagcgttccctccgcgccctgcccgccgcgctcgcctgcggtgagccgcagttcgcggtgcgcgggggagaggtcctggtgcctcggctcgtccgggccgggtccgcggccgacggcgcgccgacacctccgcgggagcgggcggtggggcggccggacgcgaccatgccgtccgtgtgggatccggagggcacggtgctgatcaccggcggcaccggcacgctgggcgggcgcttcgcccggcacctggtgaccgagtacggggtgcggcggctgctgctggtcagccggcgggggcccggcgcggagggcgccgccgagctggtggagcggctggccgggctcggggcgacggccacggcggtggcgtgcgacgtctccgaccccgaggcgctgtccggcctgctggaggcgataccggccgagcacccgctgaccgcggtcgtgcacacggcgggtgtgctggacgacggcctggtctccgcgctgacgcccgagcggatggacgcggtgctgcggcccaaggcggacgcggcatggcacctgcaccggctcacccagggccgggacctgagggcgttcgtcctgttctcctcggtgatgggcgcgctcggcggcgcggggcagggcaactacgcggcggcgaatgtctacctcgacgcgctggccgcactccgccgggcccagggacttcccgccacgtcgctggcctggggcttctgggacgaacgcagcgagctgacgggggatctggaccaggcggacctggcccggatggcccgcgcgggcctggtgcccctgcggtcggacgaggggctcgccctgttcgacacggccctcgccctgggcgagcccacgctcgttcccgcacgcctggacaccacgcggctcgctaaggacgggaacgggccgctgcccgcggtactcggcgccctggtgcgtccccgtgccgcccggcgtaccgccgcggccggttcggcgggcggcgccacgggcggacagcggttcgccgggatgtccgcggccgacgcggagcgcgagctcatggaggcggtgcgcgcccacaccgcgaccgtgctggggcacgcgacgccggaggcggtccggccggacagcaggttcaaggacatcggcttcgactcgctgtcgtcggtggagctgcgcaaccgcctgagcgcggccttcggcctgcgcctgccggcgacagcggtcttcgaccatccgacgcccgccacgatggcccgccacctgcgcggcgaactgctcggcgaggcgacgcccgccgccgcacccgtggtcacggccgccgcgctggacgagcccgtggccatcgtgggcatgggatgccggcttcccggcggcgtcacctcccccgaggagctgtgggagctggtcgcgtccggcagccacgggatctcggggctgccgaccgaccgcggctgggacgtcgacgggctctacgaccccgaccccgaccggcggggcaagagctatgtccgtgaggcgggcttcctctacgacgcgggcgagttcgacgccgacttcttcggtatcgcgccccgcgaggcgctggccatggacccgcagcagcggctgctcctggagaccacctgggaggcgttcgagcgtgcgggcatccgcccggagtcggtgcacggcagccggacgggcgtgttcgtgggcgccatgccccaggagtacggccctcacctgcacgatgccaccgagggactggacggcctgctgctgaccggcaatacgaccagtgtgctctccggccgcctcgcctacttcctcggtcttgagggcccggccctcaccatcgacacggcgtgttcgtcgtccctggtggcgctgcaccaggcggcgcatgcgctgcgccagggggagtgcaccctcgcggtggccggcggcgtggccgtgatggccactccgggagtgctcaccgagttcagcaggcagcgcgctctcgcgcccgacggccggatcaagtcgttcgcggcctccgccgacggcacgggctggagtgagggcgtcggaatcctcctcctggagcggctctccgacgcgcggaagaacggccatcaggtgctggcggtcgtgcgcggctcggcggtcaaccaggacggcgcgagcaacggcctgaccgcccccaacgggccttcccaggagcgcgtcatccgccaggccctggccaacgcccggctcaccccggacgaggtcgacgtggtcgaggcgcacggcacgggtaccaagctgggtgacccgatcgaggcgcaggcgctgatcgccacctacggtcagaaccggcccgaggaccggccgctgtggctgggttcgctgaagtcgaacatcggccacagcatggcggccgccggcgtctccggtgtgatcaagatggtgatggccctgcggcacggggtactgccccgcacactgaacgtggacgagccgaccccgcacgtcgactggcccgcgggcgcggtggagctgctcaccgaggagcggtcctggccggacccgggacgcccgcgccgcgcggcggtctcctccttcggtatcagcggcaccaacgcccatctcatcgtcgagcaggctccggaggacaccggcgtcacccgtgagggtgtgccggagccggaggtggtcacggacgggacggtgccgtggctggtgtcggcgaagtcggaagccgcgctggcagagcaggcgcgacgtctcctcgaccacctcgaccgtcaccctggggtgacccccgccgaggtcggccacacgctggcggccagccgttcggtgttcgatcaccgggcggtgttgatcggccgtgaactggccgaccaccgaggcgcgttgaccgcgctggccgctggtgagccctccgcccgggtggtcaccggcacggtggcggcgcagccgggcaggacggtcttcgtctttcccgggcagggctcgcagtgggccggtatgggtgtggagctgatgcgcacctcgccggtgttcgcggagcacctcacggcgtgcgcggcggcgcttgagccgcacaccggctggagtctcatcgacgtcctcgaccagacgcagggcgccccagatctcgaccgcgtcgacgtcatccagcctgcgctgtgggccatgatgatctccttggcccggctgtgggagcacctgggcatcaccccggacgccgtagtgggccactcccagggtgagatcgccgcggcgcacatcgccggtgtgctgtcgctggaggactccgctcgcatcgtggccttgcgctcccgggccatcacccacatcgcgggcgacggcgggatggtctccctgccccttgccgtggcggacgccgaggaactcatcgcccggtgggaggagcgggtggtcgtggccgcggtcaacgggccgtcggccaccgtggttgccggtgacgccgacgcgctggcggagatcgtcacccactgcgagggcgaggacatccgggcccggaagatcccggtggactacgcctcccactccccgcacgtcgaggcgctccacgacgaactgctggagctgctggctccggtgcgcccgcgggaggcggaggtggcgttctactcgacggtgggcgaccacgccaagggcgcgatgagcgacacgacggcgatgggtgcggcgtactggtacgagaacctgcgcaccaccgtggccttcgaggcggccgcccgcgccctgctggacgacgggcacaccctgttcgtcgaggtcagcccccacccggtactcacccaccccctccaggagaccgtcgaggaccacacgggcgccggcgaggtcgccgtcaccggcaccctgcgccgcgacgacgacacctggcagcgcgtgctgaccgcgctcgccaccgcccacacccacaccaccgcccccgtcgactggtcgggcttcttccccgccacccggcccacccacctcgacctgcccacctaccccttccagcaccagcactactggatccagcagaccaccaccgcgaccgatccccacaccctcggcctgcacgccgccgaccacggcctgctcggtgccgccgtcgccctcgcggacggcgacggacacgtgttcacagggcacctgtcgctgcgcagccatccctggctggccgaccacgccgtccacgacacgtccctcctgcccggcaccgcgttcgtcgaactggccctccacgccggtcaggccaccgacaccccccacctggaagacctcaccctcgaagcccccctcaccctcccggccaccggcggcctccacctgcaggtgcacgtggccgcatccgacggcgacggccaccgggccctcaccatccactcccgacccgacgacgccacccccgacctgccctggacccgccacgccaacggcactctcgccccccagccgtccggcgcgccggacccggccgagtgggcggaactcgcggcctggccgccggccggcgccactcccgtgcccgccggcactctctacgaccatctcgccgaccgcggctaccgctacggcaccaccttccagggcctgaccgccgtctggcgccagggcggcgccctctacgccgaagtcaccctctccgacgacaccgacaacgccaccgccgccgaccactacggcatccaccccgcgctcttcgacgccgcgctccacccgatcgtcggcgccggccccgagcaggactcggaccaggtgctgctgccgttcgcctggtcgaacgtccagctgcacgccgtgggcgcccgggccctgcgcgtccagatcagccctgctgacgcggggacgctgcgcgtcaggctcgccgatcccaccgggcagccggtcgccgaagcggcatcgctggccctgcggcccatcaccaccgagcagttggcgaaggccgttgcggcgggaggagacgaccacctgttccgcctggcctggacccccgcgtccgtcacggaggagctcaagaccggccgtgtggcgttcctgggagccgccgttcccgaggcactggtcacatcgctgcccggcgatgtcgcggtcgagcgccacgagaagctggcaccgctgctggcggacgacaccgctctcctcccggacctggtcatcgcgactggcctgctggagcgttcccactcgggcgaggacgtccccggccccgcgcgcgaggccgtccagtacgccttggacctggtccaggagtggttggccgaggagcggctggccggcagccggctcgtgttcgtcaccaggcgagccgtcgcggtccatgccgacaccgagtcgcccagccccgcggacgccgctgtctggggcctgatccgtacggctgaggccgagaatccgggccgcttcaccctgatcgacctggcggacgagaaggccatcgcatccgagtcgttccgcgcggcgttgggaagcggcgaaccgcaggtggccgtgcgtgacggcgatcagcggctgtacgtcccccggctcgtacgggaggtgcagcccgacgacaccgccgtaccggagcccgccgcgggcggcacggtgctgatcaccggcggcacgggcaccctcggcacactgttcgcccgccattacgcgacggctcggcaggccggccatctgctgttgaccagccgacgcggcccggacgctccgggcgcgcgcgaactcgccgccgaactgaccgaactgggtgtgaaggtgaccgtcgtcgcctgcgacaccgccgaccgcggcgccctcgccgcgctcctcgcggccgtccccgacgaacaccccctcaccgccgtcgtgcacaccgccggcgtcctcgacgacggcaccatcacctccctgacggcggaacgcgtcgagcgcgtcttccgcccgaaggtcgacgccgcctggcacctgcacgagctcacccgcgagagcgacctcaccgagttcgtcctcttctcctccgcggcgggcgttctgggcacgccgggccagggcaactacgccgcggcgaacgtcttcctcgacgcgctggccgaacgccgtcgcgccgacgggctgcccgccacctccctggcctggggactgtggtccgacagcagcggcatgaccggccacctggacgacgtggacctgacccggatggctcgcctcgggatcaagcccatcacggcggaggaaggggtggcgttgttcgaggcggcccgtgccacgggcgccgcctgcctggtccccgccaagatcgccccagccctgctccgtccccacttggagaccggcactcttcccgccgtcctccagggcctggtgcgcgctcccgtccgcaaggccaccgtggccacggcgaccgacggcgccaccctccgcgatcgcctggcccacctgtcaccagaggaggccgaggacaccctcgccaccctcgtccgcacccacgtcgccctcgtcctgggccacgacacgtccgacaccatcagtctcgacaaggcgttcaaggacctcggtttcgactcgctgaccgcggtcgagctgcgcaaccgtctggcgtcctcgaccggactgagcctggcagccaccctcgtcttcagctacccgaccccacgtgaactggggcggcacctgcacgacctgctgcgtccggcagcggacaccggctcggccgaggacgcggggatccgggaagtgctgcggaccgtcccgatcgaaaggctgcggagcgcgggcatcttggagctggtcctggcgtgcgccgacccgtctcagccgaacgccgacggccaggcggcggacacggacaccggcgcggacgagctggcggacttggacctggacgcactcgtcgaccttgttctggatgagaagggtgagtga

SEQ ID NO: 27 - DNA, 3120 bp, Streptomyces griseochromogenes
atgaccaactccgcggatcgcacagcggacggcgcggaccgggtccaacgggcgctccgcacgctgctggaggagcgcgaccgcctccgccaggagaacgacgccctgaaagccgggcgcggcgagccgatcgccgtggtggccatggcctgccgctacccggggggcgtgtcatcgcccgaggagctgtggaatgtcgtccgcgacggcctggacgtagtgggcgagttcccgcaggaccgcgggtggcgggacatcttcgacccggatcccgacacgctcggcagctcgtacacgcggcacggagggttcctgacggacgcggccgccttcgacgcggggttcttcggcatcagtccgcgtgaggcgctggcggtcgatccgcagcagcgcttgctgcttgagacgtcatgggaggtcttcgagcgggcgggcatcgtgcccgccgatgtgcgcggggccgacgtcggggtcttctccggcgtgagctccgccgagtacgggacgcgtttcgtggaggcgagcgggcacgacctggagggctacctgctgcaaggcagcgtgctgagcatcgcctccggccgagtggcctacgaattcggcctgaccggaccggcggtgagcgtggacacggcgtgctcgtcttcgctggtggccgtgcacctggcgatgcagtcactgcgctcgggggagagctcgctcgcgctcgcgggtggggcggcggtgatggcgacgcccgcgctcttcgtggagttctcccggcagcgcggtctgtccgccgacggccggtgcaggtccttcgcggacgcggccgacgggaccggctgggccgagggcgtgggggtgctgctcctggagcggctgtccgacgcccgccgcaacggccacccggtgctggccgtcctgcgcggttccgcggtgaaccaggacggggccagcaacgggctgaccgctcccaacggccgtgcccaggagaaggtgatccgcaaggctctggcgaacgcgggggtctcggccgccgaggtggacctgctcgaagcccacggcaccggaaccacgctgggggatcccatcgaggcaggcgctctgctggcgacctacggacagggacgggccgagggcaggccgctccggttggggtcgctgaagtcgaacatcggtcactccatggccgccgccggggtcggcggggtgatcaaggccgtgatggccatgcgccaccggtacctgccgaagaccctgcacgtggatcagccctcacgccacgtggactggtcatccggtgcgctcgaactgctgctggaggggcgtgagtggacccgggcgggcggcccgcggcgggccgcggtgtcgtcgttcggcgtcagcggcaccaacgcacacgtcatcctggaagaggccccgcggcaggaacaggcggacgagggcgatccggactcgggcgtcgtcggcggcctcgtgccgtgggcgctgtccggcaagagcgcggcggccgtgcaacagcaggcgcgtaagctgcgcgaattcgccgtcgccgacccgggtctcgatgtcgccgatgtcggctggtcgttgacgtcgagccggacccggttcgggcaccgcgcggtggtcctgggacacgaccgggacgagctgttgagcggcctgacggcgctcgctgccggcgaggagtccgccgcggtggtgcgcggcacggcccgggagctcggcggtacggtcttcatgttcccgggacagggttcgcagtgggtcggtatgggccgtcagttgtacgacaccttccccgtcttcgcgcagagcctcgacgcgtgcgcggccgccttggccgagtgggtcgactggtcgctgctcgacgtggtgcgcggcgtggagggggcaccgacgctggaccgggtggacgtggtgcagccggcgttgttctccgtgatggtgtccatggccgccctgtggcggtcctggggtgtggaaccggccgcggtcgtggggcacagccagggcgagatagccgcagcccacgtctgcggcgccctgtcactgcgcgacgccgccaaagtcgtggcgctccgcagcaaggctctggtggatctgatcggtcacggcgggatggcgtcggtcgcggagtccgcggatgtcgtggcggaacgtctcgctccgtggagcgaccgagtgagcatcgccgtcgtcaacggaccccgctcggtggtggtgtccggggaacccgacgccctcgacgaattcgtcgagaagatgaaggccgaaggcgctcaggcccggcgaataaaggtcgactacgcgtcccattcacatcacgtggcccgggtccgtgaccaggtgctcggcccgctgtccgacatgagcccgaagacgtcgacgctgcccttctactcgaccctgtacggcgaggtcatcgacaccgcgcagctgaacggcgactactggtataccaacctgcgcgagaaagtcgtcttcgaaacgtccgtccgacggctggccgacgacggtttccgggtgttcatcgagatgagtccgcaccccgtgctgaccgtcccggtgcaggagatcgtcgaggacgtggacgacgcggtggtcctgtcgtcgtcgcggcgggatcgcggggaggtggaggccgtgctcggctcgctggccgggctccacgtccagggcgggtccgtggactgggacgttctgttcgggacgcgtcgacgggtggatcttccgacgtacgcgttccagcggcagcgctactggctgaactccgtgcacacgggggtgacggcggaggtgtccgcgctggagccgcccgcggctgacgacgatcccgtcgccctgccggacctgatcgccgacctctccgacgacgaggcgacggcacttgtccttgaccacgtcctcacgaaggtcgccgtcgtgctcggacacccctccagcgaggccgtcgaccccgaccaggaattcaaggacatcggattcgactcgctgctctcggtgcagctgagcaagggcctggccacgacgaccggactcaagctgaggccgaacctggtgctgcggcacccgacaccgaggcgggtcgccgggtacctcaagacctcgatggccggtcgcgaccggcggtga

SEQ ID NO: 28 - DNA, 3141 bp, Streptomyces griseochromogenes
atgctgggtccattcgagatgcgcacggacgacggcgtatgggtcgacgtgccgggcgcccggctgcgcggactgttgatcgccctcgcgctcagacccggtcaggtggtcccgaaggcgtcgctcgtcgactggatctggggggagcaatcgcccgccgacgcgacgaatgccctgcagcgcttggtttcccggctgcggaaggcactgccgtacggagcggtcgaggggcatacggatggctaccggttgatcgtggaacccgacgccgtcgacgccgtacggttcgagcgcctcgtcgtcgcgagccaggcccgcaccgagaacgcctcccggcgggcgcaactgctgcgcgaggccctcgagctgtggcgcggtgcggccatgcaggacagcggcccgcaggacagcgccgcgttcgacgccgcggtcgtccggctcgacgggttgcgcctgaccgccctggaggagtggttcgacgcggagaacaccctcgggcgcggtgcggagctggtcacggagctgaccgacctggtggccgcgcatccgctgcgggaacggctcgtcgccgcgctgatgcgcgcccttgtcgcggccggtagcgacagccaggcgctccttgtgtaccagcgtgcgaaggaggccctggccgacgcgctgggcgtcgatccctcgccggagctgtccgcgttgcacgtcgcgctgctgcgcggcgagctggggacgcgtgagcggaaccgcaagaccaatctgcgcgccgagctgaccagcttcataggcaagggcgccgatgtcgccgcggtccgcgaactcatcgccgagcaccggctcaccaccgtgatcgggccgggcggcgcgggcaagaccaggctggctgcggagaccgcgcgggcgatgctcggcgatctgccggacggggcctggctggtggagctggccgccatcggcgcggacggcgacgtggccgacgtggcgcaggcgacgctcgccggactcggcctgcgggacgccctgctcggcggggccccgaacgtggagctgacggaccggctcatcgccgcgatccgcgagcgggaggcgctgctgatcctggacaactgcgagcacgtggtcgagtccgcggcggtgttcgcccaccgggtgctcggagagtgccggcggctgcggatcctggcgacgagccgcgaaccgctcggcatcaccggggaggcgctgtggcaggccgacccgctggccctgccggagccgggcgcgagcccggacgagatcgagtccgcacccgccgtgcggttgctgcgggaccgagccggagcggtgcgccgggatctcgcgtccgacgcccgcacgctggccacgatggcgcgggtgtgccgggctctcgacggaatgccgctggcgatagaactggccgcggcccggttgcgcaccatgtccatcgaccagctcgcccaccggctcgacgaccggttccgcctgctgaccagcggaagccgcaccgcgctgccgcggcacaagacgctgcgcgcgctggtcgactggagttgggagctgctcaccgacgccgagcggctcgtcctgcgccggctctcggtgttctccggcggggcgagtctggacgctgccgaacgggtctgtgcgggcgccgcggttgagcaggaacaggtgcttgagctgctcacctcgctgaccgagaagtcgctgctgcgcgccgagggcgacagtgccccgcgctaccgcatgatcggcacgatcaaggagtacgccgggcagcggctcgcggaggcgggcgaagcggagctggcacgccacgcgcacctcgcctgcttcaccgagctcgccgagaccgcggagccgcatctgcgccgcgccgagcaactgaagtggctggccacgctggaggccgagcacgacaacatcggtgcggcgatgcgcggcgcgctcgcggcgggcgaggcgcaggcggcgatgcggctcgcggcgggcgcgggctggtactggtggctcggcgggcacaggtccgagggcctggaactgatcaccgcggccagcaggatgcccggcgaggtggccgacgaggtccgggccgtgatgtacgcgctggtcgtgcatttcctgagctccgggccgggggacgaacaccaggtcgcggagtggatcgacaaggcgtaccggttcagtcggcacagccggcgcagccacccgctgatggggttcatcgccccgctgaaacgcatgctgcaggggcccgacgcgttcctgcccgcgttcgaaccgctgctcgacgacgaggacccctgggcgcgtgcgctggcccggctgcatctgggcaagatgcggatcatgctcggccagggcgggcgggacgtggacgcgcacctggagcgggcactcgccgagttccgggcgatcggcgaacggttcggaatctcgttcgccctgaccgagctggcggaccggatcgccgcgcgcggcgagttcaccgccgcgtgcgagcactacgagcaggcgatcgcggtcgtcaccgaggtcggtgccatcgaggacatcatccagatgcggtcacggcaggcgcagttgtactggctgctcggcgacgaggacgccagcgcggccgccatcgccgaggcacagcggtatgcggagcgggtcgcctggccgggcgcactggccgtgctggccctgtcgaaggcggaactcgcccggtggggcggccgccccgaggaggcacgcaggcaactcggcgccgcgacggccctgctgggcgacgacgcggagcaggcgaacatccgcgcggtgacccacgatctgctcggctacctcgccgacgacctcggcgaggcgcgagcgtaccgcgcggcggcctgcgcggcggcgtccgaggcgggacacgcgccgctgatcgcgcgggcgctcgtcggggtcgcggacctggcacttcgccgcgaccagcccgagcaggccgcgcggcttctcgcggccagcaccagcgtgcgcgggctggcggaccgctcccatacggacgtggcccggatcgagcagacagcgcggcgccgcctcggcgacgcggggttcgtcgaggcggcacgggaggggacacgcacgagctggtctcagctggtcgaggtcacgctcgcttcttga

SEQ ID NO: 29 - protein, 1046 aa, Streptomyces griseochromogenes
MLGPFEMRTDDGVWVDVPGARLRGLLIALALRPGQVVPKASLVDWIWGEQSPADATNALQRLVSRLRKALPYGAVEGHTDGYRLIVEPDAVDAVRFERLVVASQARTENASRRAQLLREALELWRGAAMQDSGPQDSAAFDAAVVRLDGLRLTALEEWFDAENTLGRGAELVTELTDLVAAHPLRERLVAALMRALVAAGSDSQALLVYQRAKEALADALGVDPSPELSALHVALLRGELGTRERNRKTNLRAELTSFIGKGADVAAVRELIAEHRLTTVIGPGGAGKTRLAAETARAMLGDLPDGAWLVELAAIGADGDVADVAQATLAGLGLRDALLGGAPNVELTDRLIAAIREREALLILDNCEHVVESAAVFAHRVLGECRRLRILATSREPLGITGEALWQADPLALPEPGASPDEIESAPAVRLLRDRAGAVRRDLASDARTLATMARVCRALDGMPLAIELAAARLRTMSIDQLAHRLDDRFRLLTSGSRTALPRHKTLRALVDWSWELLTDAERLVLRRLSVFSGGASLDAAERVCAGAAVEQEQVLELLTSLTEKSLLRAEGDSAPRYRMIGTIKEYAGQRLAEAGEAELARHAHLACFTELAETAEPHLRRAEQLKWLATLEAEHDNIGAAMRGALAAGEAQAAMRLAAGAGWYWWLGGHRSEGLELITAASRMPGEVADEVRAVMYALVVHFLSSGPGDEHQVAEWIDKAYRFSRHSRRSHPLMGFIAPLKRMLQGPDAFLPAFEPLLDDEDPWARALARLHLGKMRIMLGQGGRDVDAHLERALAEFRAIGERFGISFALTELADRIAARGEFTAACEHYEQAIAVVTEVGAIEDIIQMRSRQAQLYWLLGDEDASAAAIAEAQRYAERVAWPGALAVLALSKAELARWGGRPEEARRQLGAATALLGDDAEQANIRAVTHDLLGYLADDLGEARAYRAAACAAASEAGHAPLIARALVGVADLALRRDQPEQAARLLAASTSVRGLADRSHTDVARIEQTARRRLGDAGFVEAAREGTRTSWSQLVEVTLAS

SEQ ID NO: 30 - DNA, 216 bp, Streptomyces griseochromogenes
gtgagcacgaacccctttgacgacgaggacggccgcttctacgtcgtgatcaacgatgaggagcagcactccctgtggccggtgttcgccgaggtgcccgcgggctggcgggtggtcttcggcgaggcggccagggccgagtgcctggagtacgtcgagcagaactggaccgacatgcgtccgaagagcctgcaggaggccatggcggcggactga

SEQ ID NO: 31 - protein, 71 aa, Streptomyces griseochromogenes
VSTNPFDDEDGRFYVVINDEEQHSLWPVFAEVPAGWRVVFGEAARAECLEYVEQNWTDMRPKSLQEAMAAD

SEQ ID NO: 32 - DNA, 1347 bp, Streptomyces griseochromogenes
atgagtgatcgtgaacacgagacctatgacgtggtcggcattgggttcggtccgtccaacctgtcactcgccatagccctggaagagtaccgggcgaatggtccggagaatgagatcagtgccctctttctggagcgtcaatccgcgttcggctggcaccgcaacatgctgttgccgtcgacgaccatgcagatatccttcctcaaggatctggtcactttccgcaatccgacgtcgagtttcagcttcatcgcgtacttgcacgcgtcggggcggctcccgcagttcgtcaacaaccaggatttcttccccacgcgccaggagttccaccagtacctcgagtgggcgcaggcacgggtggccgatcgcgtcgcgtacggctcggaagtgacgtcgatccggctgccgccgggtgccgatccggagcggtcggaccggctgcgcctcgaggtggcggatgccaccggccgcaacggccgcgtggtcgaggcacggaacgtggtgatctcgaccggcctggtcccgagcatgcccgtgggaaccgagcgcgacgaacgggtgtggcacagttcggagttcctggagaagtaccgccggatgaaccccgcggaactgcgtcgggtggcggtggtcggggcgggccagagcgccgccgagatcaccaggttcctgtacgacgagcttccgcacgccgaggtgtgcgcggtcatcccgtcctacggctactccgtcgcggacgacacccccttcgccaatcagatcttcgaccccggggccgtcgacgactactacttcggcaccgagcagacgcgggaggcgttctggcggtaccaccgcaacacgaactactcggtcgtcgacgacgaggtgattcgggatctgtaccgcaggtcgtacgacgacgaggtacggggtgtgcggcgccttcagttcctcaacctgacgagggtcaccagtgtcaagcgcgtcggcgccgagacccgcgtctccctgcaggtgggccccgacgacgaggtgcgcgaactcgacttcgacgcactcgtctgcgcgaccggctacagcacgatggagcccacggacctgctcggcgatctcgaccggcactgcctgcgcgacgaggcgggccgataccgggtggagcgggactaccgcatcgtcaccgcccccgagatgcgctgcggcatctatctccaaggtggtaccgagcacacccacggactgacctcctcgctgctgtcgaacatcgctgtacgaagcggtgagatcgccgactcgatcgtcgccggccgtgcgggacggaacgccgagcgggcactcctcgccgaggtcggcggcgacacccgctga

SEQ ID NO: 33 - DNA, 60 bp, Artificial Sequence
  ErmE promoter
aggtgcacgcggtcgatcttgacggctggcgagaggtgcggggaggatctgaccgacgcg

SEQ ID NO: 34 - DNA, 97 bp, Artificial Sequence
  KasO promoter
aactcccccagtcctgcacgctgtcgtattctcctggccacgactttacaacaccgcacagcatgttgtcaaagcagagaccgttcgaatgtgaaca

SEQ ID NO: 35 - DNA, 285 bp, Artificial Sequence
  gapdh promoter
gcgtatcccctttcagatactcgcactaagaattgcaggaacgccccgatcatagcggtagccgcccagatgctgcaagccttatctggcagccgtataaaaaaagcaaccgaacaggccattcacagaagtttcacaccgctcgccgaggggctccgcacccggtgcgcgccgtacagcagcgcgcttctcccagcatcggccagttcgcccgatccgtccgtgtcgcacagccgacggctgcggtaaggtgcccgtagacgcacgtccgaccgaaggagcagc

SEQ ID NO: 36 - DNA, 285 bp, Artificial Sequence; identical to SEQ ID NO: 35
  rpslp promoter

SEQ ID NO: 37 - DNA, 9638 bp, Artificial Sequence
  PIJ10257-SARP-aztT10 vector
ggaggaagacgaagcgagcgaagccactgagcgggagcttgcggcgctgtagcgcacagcgggaggggtcgagccggcggacggttcggccccttttttggccttgaaatcgttagttaggctaactagtagttccttcgtcaccatagcgggcagggagcggatccgcggccgcgcgcgatatcgaattcgtaatcatgtcatagctgtttcctgtgtgaaattgttatccgctcacaattccacacaacatacgagccggaagcataaagtgtaaagcctggggtgcctaatgagtgagctaactcacattaattgcgttgcgctcactgcccgctttccagtcgggaaacctgtcgtgccagctgcattaatgaatcggccaacgcgcggggagaggcggtttgcgtattgggcgctcttccgcttcctcgctcactgactcgctgcgctcggtcgttcggctgcggcgagcggtatcagctcactcaaaggcggtaatacggttatccacagaatcaggggataacgcaggaaagaacatgtgagcaaaaggccagcaaaaggccaggaaccgtaaaaaggccgcgttgctggcgtttttccataggctccgcccccctgacgagcatcacaaaaatcgacgctcaagtcagaggtggcgaaacccgacaggactataaagataccaggcgtttgcccctggaagctccctcgtgcgctctcctgttccgaccctgccgcttaccggatacctgtccgcctttctcccttcgggaagcgtggcgctttctcatagctcacgctgtaggtatctcagttcggtgtaggtcgttcgctccaagctgggctgtgtgcacgaaccccccgttcagcccgaccgctgcgccttatccggtaactatcgtcttgagtccaacccggtaagacacgacttatcgccactggcagcagccactggtaacaggattagcagagcgaggtatgtaggcggtgctacagagttcttgaagtggtggcctaactacggctacactagaagaacagtatttggtatctgcgctctgctgaagccagttaccttcggaaaaagagttggtagctcttgatccggcaaacaaaccaccgctggtagcggtggtttttttgtttgcaagcagcagattacgcgcagaaaaaaaggatctcaagaagatcctttgatcttttctacggggtctgacgctcagtggaacgaaaactcacgttaagggattttggtcatgagattatcaaaaaggatcttcacctagatccttttggttcatgtgcagctccatcagcaaaaggggatgataagtttatcaccaccgactatttgcaacagtgccgttgatcgtgctatgatcgactgatgtcataagtctacacgaaccctttggcaaaatcctgtatatcgtgcgaaaaaggatggatataccgaaaaaatcgctataatgaccccgaagcagggttatgcagcggaaaagatccgtcgacctgcagctcacggtaactgatgccgtatttgcagtaccagcgtacggcccacagaatgatgtcacgctgaaaatgccggcctttgaatgggttcatgtgcagctccatcagcaaaaggggatgataagtttatcaccaccgactatttgcaacagtgccgttgatcgtgctatgatcgactgatgtcatcagcggtggagtgcaatgtcgtgcaatacgaatggcgaaaagccgagctcatcggtcagcttctcaaccttggggttacccccggcggtgtgctgctggtccacagctccttccgtagcgtccggcccctcgaagatgggccacttggactgatcgaggccctgcgtgctgcgctgggtccgggagggacgctcgtcatgccctcgtggtcaggtctggacgacgagccgttcgatcctgccacgtcgcccgttacaccggaccttggagttgtctctgacacattctggcgcctgccaaatgtaaagcgcagcgcccatccatttgcctttgcggcagcggggccacaggcagagcagatcatctctgatccattgcccctgccacctcactcgcctgcaagcccggtcgcccgtgtccatgaactcgatgggcaggtacttctcctcggcgtgggacacgatgccaacacgacgctgcatcttgccgagttgatggcaaaggttccctatggggtgccgagacactgcaccattcttcaggatggcaagttggtacgcgtcgattatctcgagaatgaccactgctgtgagcgctttgccttggcggacaggtggctcaaggagaagagccttcagaaggaaggtccagtcggtcatgcctttgctcggttgatccgctcccgcgacattgtggcgacagccctgggtcaactgggccgagatccgttgatcttcctgcatccgccagaggcgggatgcgaagaatgcgatgccgctcgccagtcgattggctgacagggattcttgtgtcacagcggacctctattcacagggtacgggccggcttaattccgcacggccggtcgcgacacggcctgtccgcaccgcggatcaggcgttgacgatgacgggctggtcggccacgtcggggacgttctcggtggtgctgcggtcgggatcgccaatctctacgggccgaccgaggcgacggtgtacgccaccgcctggttctgcgacggcgaggcgccgtcccaggccccgccgatccccgtcccccgcgtcgtcgagcgcggtgccgacgacaccgccgcgtggctcgtcacggaggccgtccccggcgtcgcggcggccgaggagtggcccgagcaccagcggttcgccgtggtcgaggcgatggcggagctggcccgcgccctccacgagctgcccgtggaggactgccccttcgaccggcgcctcgacgcggcggtcgccgaggcccggcggaacgtcgccgagggcctgtggacctcgacgaccgatctgatgtgctcagtatcaccgccagtggtatttatgtcaacaccgccagagataatttatcaccgcagatggttacctcgcctctgacccctgaccccgtcagcctgaggttgaaaaacgctcactggtaccagcccgacccgagcacgcgccggcacgcctggtcgatgtcggaccggagttcgaggtacgcggcttgcaggtccaggaaggggacgtccatgcgagtgtccgttcgagtggcggcttgcgcccgatgctagtcgcggttgatcggcgatcgcaggtgcacgcggtcgatcttgacggctggcgagaggtgcggggaggatctgaccgacgcggtccacacgtggcaccgcgatgctgttgtgggcacaatcgtgccggttggtaggatcgtctagaacaggaggccccatatgagatctcgagtgattaattaactagagtcgacctgcatagatctacgcgcccatgacaaaatcggcgggtgcagatcgcgatgctgggtccattcgagatgcgcacggacgacggcgtatgggtcgacgtgccgggcgcccggctgcgcggactgttgatcgccctcgcgctcagacccggtcaggtggtcccgaaggcgtcgctcgtcgactggatctggggggagcaatcgcccgccgacgcgacgaatgccctgcagcgcttggtttcccggctgcggaaggcactgccgtacggagcggtcgaggggcatacggatggctaccggttgatcgtggaacccgacgccgtcgacgccgtacggttcgagcgcctcgtcgtcgcgagccaggcccgcaccgagaacgcctcccggcgggcgcaactgctgcgcgaggccctcgagctgtggcgcggtgcggccatgcaggacagcggcccgcaggacagcgccgcgttcgacgccgcggtcgtccggctcgacgggttgcgcctgaccgccctggaggagtggttcgacgcggagaacaccctcgggcgcggtgcggagctggtcacggagctgaccgacctggtggccgcgcatccgctgcgggaacggctcgtcgccgcgctgatgcgcgcccttgtcgcggccggtagcgacagccaggcgctccttgtgtaccagcgtgcgaaggaggccctggccgacgcgctgggcgtcgatccctcgccggagctgtccgcgttgcacgtcgcgctgctgcgcggcgagctggggacgcgtgagcggaaccgcaagaccaatctgcgcgccgagctgaccagcttcataggcaagggcgccgatgtcgccgcggtccgcgaactcatcgccgagcaccggctcaccaccgtgatcgggccgggcggcgcgggcaagaccaggctggctgcggagaccgcgcgggcgatgctcggcgatctgccggacggggcctggctggtggagctggccgccatcggcgcggacggcgacgtggccgacgtggcgcaggcgacgctcgccggactcggcctgcgggacgccctgctcggcggggccccgaacgtggagctgacggaccggctcatcgccgcgatccgcgagcgggaggcgctgctgatcctggacaactgcgagcacgtggtcgagtccgcggcggtgttcgcccaccgggtgctcggagagtgccggcggctgcggatcctggcgacgagccgcgaaccgctcggcatcaccggggaggcgctgtggcaggccgacccgctggccctgccggagccgggcgcgagcccggacgagatcgagtccgcacccgccgtgcggttgctgcgggaccgagccggagcggtgcgccgggatctcgcgtccgacgcccgcacgctggccacgatggcgcgggtgtgccgggctctcgacggaatgccgctggcgatagaactggccgcggcccggttgcgcaccatgtccatcgaccagctcgcccaccggctcgacgaccggttccgcctgctgaccagcggaagccgcaccgcgctgccgcggcacaagacgctgcgcgcgctggtcgactggagttgggagctgctcaccgacgccgagcggctcgtcctgcgccggctctcggtgttctccggcggggcgagtctggacgctgccgaacgggtctgtgcgggcgccgcggttgagcaggaacaggtgcttgagctgctcacctcgctgaccgagaagtcgctgctgcgcgccgagggcgacagtgccccgcgctaccgcatgatcggcacgatcaaggagtacgccgggcagcggctcgcggaggcgggcgaagcggagctggcacgccacgcgcacctcgcctgcttcaccgagctcgccgagaccgcggagccgcatctgcgccgcgccgagcaactgaagtggctggccacgctggaggccgagcacgacaacatcggtgcggcgatgcgcggcgcgctcgcggcgggcgaggcgcaggcggcgatgcggctcgcggcgggcgcgggctggtactggtggctcggcgggcacaggtccgagggcctggaactgatcaccgcggccagcaggatgcccggcgaggtggccgacgaggtccgggccgtgatgtacgcgctggtcgtgcatttcctgagctccgggccgggggacgaacaccaggtcgcggagtggatcgacaaggcgtaccggttcagtcggcacagccggcgcagccacccgctgatggggttcatcgccccgctgaaacgcatgctgcaggggcccgacgcgttcctgcccgcgttcgaaccgctgctcgacgacgaggacccctgggcgcgtgcgctggcccggctgcatctgggcaagatgcggatcatgctcggccagggcgggcgggacgtggacgcgcacctggagcgggcactcgccgagttccgggcgatcggcgaacggttcggaatctcgttcgccctgaccgagctggcggaccggatcgccgcgcgcggcgagttcaccgccgcgtgcgagcactacgagcaggcgatcgcggtcgtcaccgaggtcggtgccatcgaggacatcatccagatgcggtcacggcaggcgcagttgtactggctgctcggcgacgaggacgccagcgcggccgccatcgccgaggcacagcggtatgcggagcgggtcgcctggccgggcgcactggccgtgctggccctgtcgaaggcggaactcgcccggtggggcggccgccccgaggaggcacgcaggcaactcggcgccgcgacggccctgctgggcgacgacgcggagcaggcgaacatccgcgcggtgacccacgatctgctcggctacctcgccgacgacctcggcgaggcgcgagcgtaccgcgcggcggcctgcgcggcggcgtccgaggcgggacacgcgccgctgatcgcgcgggcgctcgtcggggtcgcggacctggcacttcgccgcgaccagcccgagcaggccgcgcggcttctcgcggccagcaccagcgtgcgcgggctggcggaccgctcccatacggacgtggcccggatcgagcagacagcgcggcgccgcctcggcgacgcggggttcgtcgaggcggcacgggaggggacacgcacgagctggtctcagctggtcgaggtcacgctcgcttcttgatggatcctaggttctcatgagcggagaacgagatgacgttggaggggcaaggtcgcgctgattgctggggcaacacgtggagcggatcggggattgtctttcttcagctcgctgatgatatgctgacgctcaatgccgtttggcctccgactaacgaaaatcccgcatttggacggctgatccgattggcacggcggacggcgaatggcggagcagacgctcgtccgggggcaatgagatatgaaaaagcctgaactcaccgcgacgtatcgggccctggccagctagctagagtcgacctgcaggtccccggggatcggtcttgccttgctcgtcggtgatgtacttcaccagctccgcgaagtcgctcttcttgatggagcgcatggggacgtgcttggcaatcacgcgcaccccccggccgttttagcggctaaaaaagtcatggctctgccctcgggcggaccacgcccatcatgaccttgccaagctcgtcctgcttctcttcgatcttcgccagcagggcgaggatcgtggcatcaccgaaccgcgccgtgcgcgggtcgtcggtgagccagagtttcagcaggccgcccaggcggcccaggtcgccattgatgcgggccagctcgcggacgtgctcatagtccacgacgcccgtgattttgtagccctggccgacggccagcaggtaggccgacaggctcatgccggccgccgccgccttttcctcaatcgctcttcgttcgtctggaaggcagtacaccttgataggtgggctgcccttcctggttggcttggtttcatcagccatccgcttgccctcatctgttacgccggcggtagccggccagcctcgcagagcaggattcccgttgagcaccgccaggtgcgaataagggacagtgaagaaggaacacccgctcgcgggtgggcctacttcacctatcctgcccggctgacgccgttggatacaccaaggaaagtctacacgaaccctttggcaaaatcctgtatatcgtgcgaaaaaggatggatataccgaaaaaatcgctataatgaccccgaagcagggttatgcagcggaaaagatccgtcgacctgcaggcatgctggcgccggacggggcttcagacgtttcgggtgctgggttgttgtctctggacagtgatccatgggaaactactcagcaccaccaatgttcccaaaagaaagcgcaggtcagcgcccatgagccaagatctaggcatgtcgcccttcatcgctcccgacgtccctgagcaccttctagacactgttcgcgtcttcctgtacgcgcgtcagtctaagggccggtccgacggctcagacgtgtcgaccgaagcacagctagcggccggtcgtgcgttggtcgcgtctcgcaacgcccaggggggtgcgcgctgggtcgtggcaggtgagttcgtggacgtcgggcgctccggctgggacccgaacgtgacccgtgccgacttcgagcgcatgatgggcgaagtccgcgccggcgaaggtgacgttgtcgttgtgaatgagctttcccggctcactcgcaagggcgcccatgacgcgctcgaaatcgacaacgaattgaagaagcacggcgtgcgcttcatgtcggttcttgagccgttccttgacacgtctacccctatcggcgtcgccattttcgcgctgatcgctgcccttgcgaaacaggacagtgacctgaaggcggagcgcctgaagggtgcgaaagacgagattgccgcgctgggtggcgttcactcgtcttccgccccgttcggaatgcgcgccgtgcgcaagaaggtcgataatctcgtgatctccgttcttgagccggacgaagacaacccggatcacgtcgagctagttgagcgcatggcgaaaatgtcgttcgaaggcgtgtccgacaacgccattgcaacgaccttcgagaaggaaaagatcccgtcgcccggaatggctgagagacgcgccacggaaaagcgtcttgcgtccatcaaggcacgtcgcctgaacggcgctgaaaagccgatcatgtggcgcgctcaaacggtccgatggattctcaaccatcccgcaatcggcggtttcgcattcgagcgtgtgaagcacggtaaggcgcacatcaacgtcatacggcgcgaccccggcggcaagccgctaacgccccacacgggcattctcagcggctcgaagtggcttgagcttcaagagaagcgttccgggaagaatctcagcgaccggaagcctggggccgaagtcgaaccgacgcttctgagcgggtggcgtttcctggggtgccgaatctgcggcggctcaatgggtcagtcccagggtggccgtaagcgcaacggcgaccttgccgaaggcaattacatgtgcgccaacccgaaggggcacggcggcttgtcggtcaagcgcagcgaactggacgaattcgttgcttcgaaggtgtgggcacggctccgcacagccgacatggaagatgaacacgatcaggcatggattgccgccgctgcggagcgcttcgcccttcagcacgacctagcgggggtggccgatgagcggcgcgaacaacaggcgcacctagacaacgtgcggcgctccatcaaggaccttcaggcggaccgtaaggccggtctgtacgtcgggcgtgaagagctggaaacgtggcgctcaacggtgctgcaataccggtcctacgaagcggagtgcacgacccgactcgctgagcttgacgagaagatgaacggcagcacccgcgttccgtctgagtggttcagcggcgaagacccgacggccgaagggggcatctgggcaagctgggacgtgtacgagcgtcgggagttcctgagcttcttccttgactccgtcatggtcgaccgggggcgccaccctgagacgaagaaatacatccccctgaaggaccgtgtgacgctcaagtgggcggagctgctgaa

SEQ ID NO: 38 - DNA, 9613 bp, Artificial Sequence
  PIJ10257-SARP-aztT10-hyg vector sequence
ggaggaagacgaagcgagcgaagccactgagcgggagcttgcggcgctgtagcgcacagcgggaggggtcgagccggcggacggttcggccccttttttggccttgaaatcgttagttaggctaactagtagttccttcgtcaccatagcgggcagggagcggatccgcggccgcgcgcgatatcgaattcgtaatcatgtcatagctgtttcctgtgtgaaattgttatccgctcacaattccacacaacatacgagccggaagcataaagtgtaaagcctggggtgcctaatgagtgagctaactcacattaattgcgttgcgctcactgcccgctttccagtcgggaaacctgtcgtgccagctgcattaatgaatcggccaacgcgcggggagaggcggtttgcgtattgggcgctcttccgcttcctcgctcactgactcgctgcgctcggtcgttcggctgcggcgagcggtatcagctcactcaaaggcggtaatacggttatccacagaatcaggggataacgcaggaaagaacatgtgagcaaaaggccagcaaaaggccaggaaccgtaaaaaggccgcgttgctggcgtttttccataggctccgcccccctgacgagcatcacaaaaatcgacgctcaagtcagaggtggcgaaacccgacaggactataaagataccaggcgtttgcccctggaagctccctcgtgcgctctcctgttccgaccctgccgcttaccggatacctgtccgcctttctcccttcgggaagcgtggcgctttctcatagctcacgctgtaggtatctcagttcggtgtaggtcgttcgctccaagctgggctgtgtgcacgaaccccccgttcagcccgaccgctgcgccttatccggtaactatcgtcttgagtccaacccggtaagacacgacttatcgccactggcagcagccactggtaacaggattagcagagcgaggtatgtaggcggtgctacagagttcttgaagtggtggcctaactacggctacactagaagaacagtatttggtatctgcgctctgctgaagccagttaccttcggaaaaagagttggtagctcttgatccggcaaacaaaccaccgctggtagcggtggtttttttgtttgcaagcagcagattacgcgcagaaaaaaaggatctcaagaagatcctttgatcttttctacggggtctgacgctcagtggaacgaaaactcacgttaagggattttggtcatgagattatcaaaaaggatcttcacctagatccttttggttcatgtgcagctccatcagcaaaaggggatgataagtttatcaccaccgactatttgcaacagtgccgttgatcgtgctatgatcgactgatgtcatcagcggtggagtgcaatgtcgtgcaatacgaatggcgaaaagccgagaactgagaagccccgtcaggcaccgcccgacggggctcttcacccggggcgtcaggcgccgggggcggtgtccggcggcccccagaggaactgcgccagttcctccggatcggtgaagccggagagatccagcggggtctcctcgaacacctcgaagtcgtgcaggaaggtgaaggcgagcagttcgcgggcgaagtcctcggtccgcttccactgcgccccgtcgagcagcgcggccaggatctcgcggtcgccccggaaggcgttgagatgcagttgcaccaggctgtagcgggagtctcccgcatagacgtcggtgaagtcgacgatcccggtgacctcggtcgcggccaggtccacgaagatgttggtcccgtgcaggtcgccgtggacgaaccggggttcgcggccggccagcagcgtgtccacgtccggcagccagtcctccaggcggtccagcagccggggcgagaggtagccccacccgcggtggtcctcgacggtcgccgcgcggcgttcccgcagcagttccgggaagacctcggaatggggggtgagcacggtgttcccggtcagcggcaccctgtgcagccggccgagcacccggccgagttcgcgggccagggcgagcagcgcgttccggtcggtcgtgccgtccatcgcggaccgccaggtggtgccggtcatccggctcatcaccaggtagggccacggccaggctccggtgccgggccgcagctcgccgcggccgaggaggcggggcaccggcaccggggcgtccgccaggaccgcgtacgcctccgactccgacgcgaggctctccggaccgcaccagtgctcgccgaacagcttgatcaccgggccgggctcgccgaccagtacggggttggtgctctcgccgggcacccgcagcaccggcggcaccggcagcccgagctcctccagggctcggcgggccagcggctcccagaattcctggtcgttccgcaggctcgcgtaggaatcatccgaatcaatacggtcgagaagtaacagggattcttgtgtcacagcggacctctattcacagggtacgggccggcttaattccgcacggccggtcgcgacacggcctgtccgcaccgcggatcaggcgttgacgatgacgggctggtcggccacgtcggggacgttctcggtggtgctgcggtcgggatcgccaatctctacgggccgaccgaggcgacggtgtacgccaccgcctggttctgcgacggcgaggcgccgtcccaggccccgccgatccccgtcccccgcgtcgtcgagcgcggtgccgacgacaccgccgcgtggctcgtcacggaggccgtccccggcgtcgcggcggccgaggagtggcccgagcaccagcggttcgccgtggtcgaggcgatggcggagctggcccgcgccctccacgagctgcccgtggaggactgccccttcgaccggcgcctcgacgcggcggtcgccgaggcccggcggaacgtcgccgagggcctgtggacctcgacgaccgatctgatgtgctcagtatcaccgccagtggtatttatgtcaacaccgccagagataatttatcaccgcagatggttacctcgcctctgacccctgaccccgtcagcctgaggttgaaaaacgctcactggtaccagcccgacccgagcacgcgccggcacgcctggtcgatgtcggaccggagttcgaggtacgcggcttgcaggtccaggaaggggacgtccatgcgagtgtccgttcgagtggcggcttgcgcccgatgctagtcgcggttgatcggcgatcgcaggtgcacgcggtcgatcttgacggctggcgagaggtgcggggaggatctgaccgacgcggtccacacgtggcaccgcgatgctgttgtgggcacaatcgtgccggttggtaggatcgtctagaacaggaggccccatatgagatctcgagtgattaattaactagagtcgacctgcatagatctacgcgcccatgacaaaatcggcgggtgcagatcgcgatgctgggtccattcgagatgcgcacggacgacggcgtatgggtcgacgtgccgggcgcccggctgcgcggactgttgatcgccctcgcgctcagacccggtcaggtggtcccgaaggcgtcgctcgtcgactggatctggggggagcaatcgcccgccgacgcgacgaatgccctgcagcgcttggtttcccggctgcggaaggcactgccgtacggagcggtcgaggggcatacggatggctaccggttgatcgtggaacccgacgccgtcgacgccgtacggttcgagcgcctcgtcgtcgcgagccaggcccgcaccgagaacgcctcccggcgggcgcaactgctgcgcgaggccctcgagctgtggcgcggtgcggccatgcaggacagcggcccgcaggacagcgccgcgttcgacgccgcggtcgtccggctcgacgggttgcgcctgaccgccctggaggagtggttcgacgcggagaacaccctcgggcgcggtgcggagctggtcacggagctgaccgacctggtggccgcgcatccgctgcgggaacggctcgtcgccgcgctgatgcgcgcccttgtcgcggccggtagcgacagccaggcgctccttgtgtaccagcgtgcgaaggaggccctggccgacgcgctgggcgtcgatccctcgccggagctgtccgcgttgcacgtcgcgctgctgcgcggcgagctggggacgcgtgagcggaaccgcaagaccaatctgcgcgccgagctgaccagcttcataggcaagggcgccgatgtcgccgcggtccgcgaactcatcgccgagcaccggctcaccaccgtgatcgggccgggcggcgcgggcaagaccaggctggctgcggagaccgcgcgggcgatgctcggcgatctgccggacggggcctggctggtggagctggccgccatcggcgcggacggcgacgtggccgacgtggcgcaggcgacgctcgccggactcggcctgcgggacgccctgctcggcggggccccgaacgtggagctgacggaccggctcatcgccgcgatccgcgagcgggaggcgctgctgatcctggacaactgcgagcacgtggtcgagtccgcggcggtgttcgcccaccgggtgctcggagagtgccggcggctgcggatcctggcgacgagccgcgaaccgctcggcatcaccggggaggcgctgtggcaggccgacccgctggccctgccggagccgggcgcgagcccggacgagatcgagtccgcacccgccgtgcggttgctgcgggaccgagccggagcggtgcgccgggatctcgcgtccgacgcccgcacgctggccacgatggcgcgggtgtgccgggctctcgacggaatgccgctggcgatagaactggccgcggcccggttgcgcaccatgtccatcgaccagctcgcccaccggctcgacgaccggttccgcctgctgaccagcggaagccgcaccgcgctgccgcggcacaagacgctgcgcgcgctggtcgactggagttgggagctgctcaccgacgccgagcggctcgtcctgcgccggctctcggtgttctccggcggggcgagtctggacgctgccgaacgggtctgtgcgggcgccgcggttgagcaggaacaggtgcttgagctgctcacctcgctgaccgagaagtcgctgctgcgcgccgagggcgacagtgccccgcgctaccgcatgatcggcacgatcaaggagtacgccgggcagcggctcgcggaggcgggcgaagcggagctggcacgccacgcgcacctcgcctgcttcaccgagctcgccgagaccgcggagccgcatctgcgccgcgccgagcaactgaagtggctggccacgctggaggccgagcacgacaacatcggtgcggcgatgcgcggcgcgctcgcggcgggcgaggcgcaggcggcgatgcggctcgcggcgggcgcgggctggtactggtggctcggcgggcacaggtccgagggcctggaactgatcaccgcggccagcaggatgcccggcgaggtggccgacgaggtccgggccgtgatgtacgcgctggtcgtgcatttcctgagctccgggccgggggacgaacaccaggtcgcggagtggatcgacaaggcgtaccggttcagtcggcacagccggcgcagccacccgctgatggggttcatcgccccgctgaaacgcatgctgcaggggcccgacgcgttcctgcccgcgttcgaaccgctgctcgacgacgaggacccctgggcgcgtgcgctggcccggctgcatctgggcaagatgcggatcatgctcggccagggcgggcgggacgtggacgcgcacctggagcgggcactcgccgagttccgggcgatcggcgaacggttcggaatctcgttcgccctgaccgagctggcggaccggatcgccgcgcgcggcgagttcaccgccgcgtgcgagcactacgagcaggcgatcgcggtcgtcaccgaggtcggtgccatcgaggacatcatccagatgcggtcacggcaggcgcagttgtactggctgctcggcgacgaggacgccagcgcggccgccatcgccgaggcacagcggtatgcggagcgggtcgcctggccgggcgcactggccgtgctggccctgtcgaaggcggaactcgcccggtggggcggccgccccgaggaggcacgcaggcaactcggcgccgcgacggccctgctgggcgacgacgcggagcaggcgaacatccgcgcggtgacccacgatctgctcggctacctcgccgacgacctcggcgaggcgcgagcgtaccgcgcggcggcctgcgcggcggcgtccgaggcgggacacgcgccgctgatcgcgcgggcgctcgtcggggtcgcggacctggcacttcgccgcgaccagcccgagcaggccgcgcggcttctcgcggccagcaccagcgtgcgcgggctggcggaccgctcccatacggacgtggcccggatcgagcagacagcgcggcgccgcctcggcgacgcggggttcgtcgaggcggcacgggaggggacacgcacgagctggtctcagctggtcgaggtcacgctcgcttcttgatggatcctaggttctcatgagcggagaacgagatgacgttggaggggcaaggtcgcgctgattgctggggcaacacgtggagcggatcggggattgtctttcttcagctcgctgatgatatgctgacgctcaatgccgtttggcctccgactaacgaaaatcccgcatttggacggctgatccgattggcacggcggacggcgaatggcggagcagacgctcgtccgggggcaatgagatatgaaaaagcctgaactcaccgcgacgtatcgggccctggccagctagctagagtcgacctgcaggtccccggggatcggtcttgccttgctcgtcggtgatgtacttcaccagctccgcgaagtcgctcttcttgatggagcgcatggggacgtgcttggcaatcacgcgcaccccccggccgttttagcggctaaaaaagtcatggctctgccctcgggcggaccacgcccatcatgaccttgccaagctcgtcctgcttctcttcgatcttcgccagcagggcgaggatcgtggcatcaccgaaccgcgccgtgcgcgggtcgtcggtgagccagagtttcagcaggccgcccaggcggcccaggtcgccattgatgcgggccagctcgcggacgtgctcatagtccacgacgcccgtgattttgtagccctggccgacggccagcaggtaggccgacaggctcatgccggccgccgccgccttttcctcaatcgctcttcgttcgtctggaaggcagtacaccttgataggtgggctgcccttcctggttggcttggtttcatcagccatccgcttgccctcatctgttacgccggcggtagccggccagcctcgcagagcaggattcccgttgagcaccgccaggtgcgaataagggacagtgaagaaggaacacccgctcgcgggtgggcctacttcacctatcctgcccggctgacgccgttggatacaccaaggaaagtctacacgaaccctttggcaaaatcctgtatatcgtgcgaaaaaggatggatataccgaaaaaatcgctataatgaccccgaagcagggttatgcagcggaaaagatccgtcgacctgcaggcatgctggcgccggacggggcttcagacgtttcgggtgctgggttgttgtctctggacagtgatccatgggaaactactcagcaccaccaatgttcccaaaagaaagcgcaggtcagcgcccatgagccaagatctaggcatgtcgcccttcatcgctcccgacgtccctgagcaccttctagacactgttcgcgtcttcctgtacgcgcgtcagtctaagggccggtccgacggctcagacgtgtcgaccgaagcacagctagcggccggtcgtgcgttggtcgcgtctcgcaacgcccaggggggtgcgcgctgggtcgtggcaggtgagttcgtggacgtcgggcgctccggctgggacccgaacgtgacccgtgccgacttcgagcgcatgatgggcgaagtccgcgccggcgaaggtgacgttgtcgttgtgaatgagctttcccggctcactcgcaagggcgcccatgacgcgctcgaaatcgacaacgaattgaagaagcacggcgtgcgcttcatgtcggttcttgagccgttccttgacacgtctacccctatcggcgtcgccattttcgcgctgatcgctgcccttgcgaaacaggacagtgacctgaaggcggagcgcctgaagggtgcgaaagacgagattgccgcgctgggtggcgttcactcgtcttccgccccgttcggaatgcgcgccgtgcgcaagaaggtcgataatctcgtgatctccgttcttgagccggacgaagacaacccggatcacgtcgagctagttgagcgcatggcgaaaatgtcgttcgaaggcgtgtccgacaacgccattgcaacgaccttcgagaaggaaaagatcccgtcgcccggaatggctgagagacgcgccacggaaaagcgtcttgcgtccatcaaggcacgtcgcctgaacggcgctgaaaagccgatcatgtggcgcgctcaaacggtccgatggattctcaaccatcccgcaatcggcggtttcgcattcgagcgtgtgaagcacggtaaggcgcacatcaacgtcatacggcgcgaccccggcggcaagccgctaacgccccacacgggcattctcagcggctcgaagtggcttgagcttcaagagaagcgttccgggaagaatctcagcgaccggaagcctggggccgaagtcgaaccgacgcttctgagcgggtggcgtttcctggggtgccgaatctgcggcggctcaatgggtcagtcccagggtggccgtaagcgcaacggcgaccttgccgaaggcaattacatgtgcgccaacccgaaggggcacggcggcttgtcggtcaagcgcagcgaactggacgaattcgttgcttcgaaggtgtgggcacggctccgcacagccgacatggaagatgaacacgatcaggcatggattgccgccgctgcggagcgcttcgcccttcagcacgacctagcgggggtggccgatgagcggcgcgaacaacaggcgcacctagacaacgtgcggcgctccatcaaggaccttcaggcggaccgtaaggccggtctgtacgtcgggcgtgaagagctggaaacgtggcgctcaacggtgctgcaataccggtcctacgaagcggagtgcacgacccgactcgctgagcttgacgagaagatgaacggcagcacccgcgttccgtctgagtggttcagcggcgaagacccgacggccgaagggggcatctgggcaagctgggacgtgtacgagcgtcgggagttcctgagcttcttccttgactccgtcatggtcgaccgggggcgccaccctgagacgaagaaatacatccccctgaaggaccgtgtgacgctcaagtgggcggagctgctgaa

SEQ ID NO: 39 - DNA, 13202 bp, Artificial Sequence
  PIJ10257-SARP-trns2 vector
ggaggaagacgaagcgagcgaagccactgagcgggagcttgcggcgctgtagcgcacagcgggaggggtcgagccggcggacggttcggccccttttttggccttgaaatcgttagttaggctaactagtagttccttcgtcaccatagcgggcagggagcggatccgcggccgcgcgcgatatcgaattcgtaatcatgtcatagctgtttcctgtgtgaaattgttatccgctcacaattccacacaacatacgagccggaagcataaagtgtaaagcctggggtgcctaatgagtgagctaactcacattaattgcgttgcgctcactgcccgctttccagtcgggaaacctgtcgtgccagctgcattaatgaatcggccaacgcgcggggagaggcggtttgcgtattgggcgctcttccgcttcctcgctcactgactcgctgcgctcggtcgttcggctgcggcgagcggtatcagctcactcaaaggcggtaatacggttatccacagaatcaggggataacgcaggaaagaacatgtgagcaaaaggccagcaaaaggccaggaaccgtaaaaaggccgcgttgctggcgtttttccataggctccgcccccctgacgagcatcacaaaaatcgacgctcaagtcagaggtggcgaaacccgacaggactataaagataccaggcgtttgcccctggaagctccctcgtgcgctctcctgttccgaccctgccgcttaccggatacctgtccgcctttctcccttcgggaagcgtggcgctttctcatagctcacgctgtaggtatctcagttcggtgtaggtcgttcgctccaagctgggctgtgtgcacgaaccccccgttcagcccgaccgctgcgccttatccggtaactatcgtcttgagtccaacccggtaagacacgacttatcgccactggcagcagccactggtaacaggattagcagagcgaggtatgtaggcggtgctacagagttcttgaagtggtggcctaactacggctacactagaagaacagtatttggtatctgcgctctgctgaagccagttaccttcggaaaaagagttggtagctcttgatccggcaaacaaaccaccgctggtagcggtggtttttttgtttgcaagcagcagattacgcgcagaaaaaaaggatctcaagaagatcctttgatcttttctacggggtctgacgctcagtggaacgaaaactcacgttaagggattttggtcatgagattatcaaaaaggatcttcacctagatccttttggttcatgtgcagctccatcagcaaaaggggatgataagtttatcaccaccgactatttgcaacagtgccgttgatcgtgctatgatcgactgatgtcatcagcggtggagtgcaatgtcgtgcaatacgaatggcgaaaagccgagaactgagaagccccgtcaggcaccgcccgacggggctcttcacccggggcgtcaggcgccgggggcggtgtccggcggcccccagaggaactgcgccagttcctccggatcggtgaagccggagagatccagcggggtctcctcgaacacctcgaagtcgtgcaggaaggtgaaggcgagcagttcgcgggcgaagtcctcggtccgcttccactgcgccccgtcgagcagcgcggccaggatctcgcggtcgccccggaaggcgttgagatgcagttgcaccaggctgtagcgggagtctcccgcatagacgtcggtgaagtcgacgatcccggtgacctcggtcgcggccaggtccacgaagatgttggtcccgtgcaggtcgccgtggacgaaccggggttcgcggccggccagcagcgtgtccacgtccggcagccagtcctccaggcggtccagcagccggggcgagaggtagccccacccgcggtggtcctcgacggtcgccgcgcggcgttcccgcagcagttccgggaagacctcggaatggggggtgagcacggtgttcccggtcagcggcaccctgtgcagccggccgagcacccggccgagttcgcgggccagggcgagcagcgcgttccggtcggtcgtgccgtccatcgcggaccgccaggtggtgccggtcatccggctcatcaccaggtagggccacggccaggctccggtgccgggccgcagctcgccgcggccgaggaggcggggcaccggcaccggggcgtccgccaggaccgcgtacgcctccgactccgacgcgaggctctccggaccgcaccagtgctcgccgaacagcttgatcaccgggccgggctcgccgaccagtacggggttggtgctctcgccgggcacccgcagcaccggcggcaccggcagcccgagctcctccagggctcggcgggccagcggctcccagaattcctggtcgttccgcaggctcgcgtaggaatcatccgaatcaatacggtcgagaagtaacagggattcttgtgtcacagcggacctctattcacagggtacgggccggcttaattccgcacggccggtcgcgacacggcctgtccgcaccgcggatcaggcgttgacgatgacgggctggtcggccacgtcggggacgttctcggtggtgctgcggtcgggatcgccaatctctacgggccgaccgaggcgacggtgtacgccaccgcctggttctgcgacggcgaggcgccgtcccaggccccgccgatccccgtcccccgcgtcgtcgagcgcggtgccgacgacaccgccgcgtggctcgtcacggaggccgtccccggcgtcgcggcggccgaggagtggcccgagcaccagcggttcgccgtggtcgaggcgatggcggagctggcccgcgccctccacgagctgcccgtggaggactgccccttcgaccggcgcctcgacgcggcggtcgccgaggcccggcggaacgtcgccgagggcctgtggacctcgacgaccgatctgatgtgctcagtatcaccgccagtggtatttatgtcaacaccgccagagataatttatcaccgcagatggttacctcgcctctgacccctgaccccgtcagcctgaggttgaaaaacgctcactggtaccagcccgacccgagcacgcgccggcacgcctggtcgatgtcggaccggagttcgaggtacgcggcttgcaggtccaggaaggggacgtccatgcgagtgtccgttcgagtggcggcttgcgcccgatgctagtcgcggttgatcggcgatcgcaggtgcacgcggtcgatcttgacggctggcgagaggtgcggggaggatctgaccgacgcggtccacacgtggcaccgcgatgctgttgtgggcacaatcgtgccggttggtaggatcgtctagaacaggaggccccatatgagatctcgagtgattaattaactagagtcgacctgcatagatctacgcgcccatgacaaaatcggcgggtgcagatcgcgatgctgggtccattcgagatgcgcacggacgacggcgtatgggtcgacgtgccgggcgcccggctgcgcggactgttgatcgccctcgcgctcagacccggtcaggtggtcccgaaggcgtcgctcgtcgactggatctggggggagcaatcgcccgccgacgcgacgaatgccctgcagcgcttggtttcccggctgcggaaggcactgccgtacggagcggtcgaggggcatacggatggctaccggttgatcgtggaacccgacgccgtcgacgccgtacggttcgagcgcctcgtcgtcgcgagccaggcccgcaccgagaacgcctcccggcgggcgcaactgctgcgcgaggccctcgagctgtggcgcggtgcggccatgcaggacagcggcccgcaggacagcgccgcgttcgacgccgcggtcgtccggctcgacgggttgcgcctgaccgccctggaggagtggttcgacgcggagaacaccctcgggcgcggtgcggagctggtcacggagctgaccgacctggtggccgcgcatccgctgcgggaacggctcgtcgccgcgctgatgcgcgcccttgtcgcggccggtagcgacagccaggcgctccttgtgtaccagcgtgcgaaggaggccctggccgacgcgctgggcgtcgatccctcgccggagctgtccgcgttgcacgtcgcgctgctgcgcggcgagctggggacgcgtgagcggaaccgcaagaccaatctgcgcgccgagctgaccagcttcataggcaagggcgccgatgtcgccgcggtccgcgaactcatcgccgagcaccggctcaccaccgtgatcgggccgggcggcgcgggcaagaccaggctggctgcggagaccgcgcgggcgatgctcggcgatctgccggacggggcctggctggtggagctggccgccatcggcgcggacggcgacgtggccgacgtggcgcaggcgacgctcgccggactcggcctgcgggacgccctgctcggcggggccccgaacgtggagctgacggaccggctcatcgccgcgatccgcgagcgggaggcgctgctgatcctggacaactgcgagcacgtggtcgagtccgcggcggtgttcgcccaccgggtgctcggagagtgccggcggctgcggatcctggcgacgagccgcgaaccgctcggcatcaccggggaggcgctgtggcaggccgacccgctggccctgccggagccgggcgcgagcccggacgagatcgagtccgcacccgccgtgcggttgctgcgggaccgagccggagcggtgcgccgggatctcgcgtccgacgcccgcacgctggccacgatggcgcgggtgtgccgggctctcgacggaatgccgctggcgatagaactggccgcggcccggttgcgcaccatgtccatcgaccagctcgcccaccggctcgacgaccggttccgcctgctgaccagcggaagccgcaccgcgctgccgcggcacaagacgctgcgcgcgctggtcgactggagttgggagctgctcaccgacgccgagcggctcgtcctgcgccggctctcggtgttctccggcggggcgagtctggacgctgccgaacgggtctgtgcgggcgccgcggttgagcaggaacaggtgcttgagctgctcacctcgctgaccgagaagtcgctgctgcgcgccgagggcgacagtgccccgcgctaccgcatgatcggcacgatcaaggagtacgccgggcagcggctcgcggaggcgggcgaagcggagctggcacgccacgcgcacctcgcctgcttcaccgagctcgccgagaccgcggagccgcatctgcgccgcgccgagcaactgaagtggctggccacgctggaggccgagcacgacaacatcggtgcggcgatgcgcggcgcgctcgcggcgggcgaggcgcaggcggcgatgcggctcgcggcgggcgcgggctggtactggtggctcggcgggcacaggtccgagggcctggaactgatcaccgcggccagcaggatgcccggcgaggtggccgacgaggtccgggccgtgatgtacgcgctggtcgtgcatttcctgagctccgggccgggggacgaacaccaggtcgcggagtggatcgacaaggcgtaccggttcagtcggcacagccggcgcagccacccgctgatggggttcatcgccccgctgaaacgcatgctgcaggggcccgacgcgttcctgcccgcgttcgaaccgctgctcgacgacgaggacccctgggcgcgtgcgctggcccggctgcatctgggcaagatgcggatcatgctcggccagggcgggcgggacgtggacgcgcacctggagcgggcactcgccgagttccgggcgatcggcgaacggttcggaatctcgttcgccctgaccgagctggcggaccggatcgccgcgcgcggcgagttcaccgccgcgtgcgagcactacgagcaggcgatcgcggtcgtcaccgaggtcggtgccatcgaggacatcatccagatgcggtcacggcaggcgcagttgtactggctgctcggcgacgaggacgccagcgcggccgccatcgccgaggcacagcggtatgcggagcgggtcgcctggccgggcgcactggccgtgctggccctgtcgaaggcggaactcgcccggtggggcggccgccccgaggaggcacgcaggcaactcggcgccgcgacggccctgctgggcgacgacgcggagcaggcgaacatccgcgcggtgacccacgatctgctcggctacctcgccgacgacctcggcgaggcgcgagcgtaccgcgcggcggcctgcgcggcggcgtccgaggcgggacacgcgccgctgatcgcgcgggcgctcgtcggggtcgcggacctggcacttcgccgcgaccagcccgagcaggccgcgcggcttctcgcggccagcaccagcgtgcgcgggctggcggaccgctcccatacggacgtggcccggatcgagcagacagcgcggcgccgcctcggcgacgcggggttcgtcgaggcggcacgggaggggacacgcacgagctggtctcagctggtcgaggtcacgctcgcttcttgaacagagcggtgacagacgggtgacagacctggccgcgactgtggaggcatgagaagtacagcgattgcagtttcagggctgcggaaggcatacggagacaagaccgtgctcgacggcatcgatttcgatgtcgccgaagggtcgatcttctccctgctcggcccgaacggggcgggcaagacgacgacggtgaacgtcctggcgacgttgctgaaggccgacgccgggacggtgcacgtcgccgggcacgacgtggcgaccgcgaccaagcaggtgcgcgccgccatcggcgtgaccggtcagttcgccgcagtggacgagctgctctcgggccgggagaacctccagatgatggcggacctgaagcgcgtgcgctccggcgaggtcgtcacgcggctgctggagcggttcgacctggtggagtcggcggacaagatggcgtcgacctactccggcggtatgcgccggaagctggacctggcgatgacgctggtcggcaacccgcggatcatcttcctggacgagccgacgacgggtctcgacccgcgcagcaggcgcacgatgtgggggatcgtccgcgagttggtggccgacggcaccaccatcttcctcaccacccagtacctggacgaggccgacgagctcgccgaccagatcgcggtgctgagcgatggcaagctcgtcgccgaggggagcgccgaggagctgaagcggctcatccccggcgggcacgtgcggctgcgcttcaccgaccaggccgcgtaccggtcggccgcctccgcgctgcgcgacgtcaccacggacgacgacacgctgtcggtgcagatcccgagcgacggcacccagcgcgagctgcgctccatcctcgactggctggactcggtcggtatcgaggcggacgagctgaccgtgcacactcccgacctcgacgacgtcttcctcaccttgaccgagcgcacgagcaaggaggcgatctcgcagtgagcgctgtctcgacggcactggccgactcggcgatcatgctgcgtcgcaacctgaagcacaccatgcggaaccccgtcacggtgttcaacgcgatcctgttcccgatcgtgatcatgctcatgttcgtcaaggtgttcggcggcgccttcagcgtcggtcagcactacatcgactacgcgacgccgggcatgctcgtgatggccgtcagctacggcctcggggccaccgcgacgtccgtgaactccgacatgaccaagggcatcatcaaccggttcaagaccatggacgtctcccgcggagccatgctgaccggacacgtcgtcgtcaccacggtgcgctgcctggtggccgccgcggccatcatcggggtggccttcgcgatgggattcgacccccacgcgagcgccctcgactggctcggcgtgctcggtctcttcctgctcctcgccgtcggggccagctggctcaccgtcgccatgggcctgggcgcgaagagcgcggagtcggcgggcctggccgccgtgccgctgatcatgctgccgttcctgagcagcgcgttcgtgcccgcggacacgatgggggcaggggtgcggcagttcgcggagtaccagcccttcaccccgatcatcgagacactgcgcgggctgctgtcgggccaccacgcgtcgaccggccacacggtgtcggctcttgcctggtgcatcgggttggcgatcgtcgggtacctgtgggcggtctccacgttcaagaagcgagcgtgacccctcacccacttcagccttcgaacggagggcaccatgccttcttttgtcatgcccacgtctgggctggccgacggtcacacgtcgtcggccgccatctccgccaccggtctgcgcaagtcgtacggcgacaagaccgtcctcgacggcatcgatctgcacatcccggccggctcggtcttcgcgctgctcgggcccaacggcgccggcaagaccaccaccgtgcagatcctgtccacgctcatcagcgccgacggcgggcaggctcaggtcgcgggccacgacgtcgccacgtcaccggagggggtgcgcgccgcgatcggtgtcaccggccagttctccgccgtcgacgggctgatcaccggcgaagagaacatgctcctcatggcggacctgcaccacctgccacgaagcgagggacggcgggcagccgccgagctcctcgagcgcttcgacctggtcgaggccgcgaaaaagcccgcctccacctactccggcggcatgaagcgccgcctcgacatcgccatgaccctggtcggcaatccccgcatcatcttcctcgacgagcccagcaccggcctcgacccccgctcacgacacaacatgtggcgcatcatccgcgagctgctgtccgacggcatcaccatcttcctcaccacccagtacctggaagaggccgaccagctcgccgaccgcatcgccgtgctcaacaacggccagatcgcggccgagggcaccgccgaggagctgaaacggctgatccccggcggacatgtccggctccgcttctccgacccgtccgtctatcagagcgccgccctcgcgctgcgcgaggccacccgggacgacgaagcgctgtcgttgcagattcccagtgacggcggccagcgcgagctgcgctccatcctcgactggctggactccgccgacatcgaggcggatgagctgaccgtgcacacccccgacctcgacgacgtgttcttcgccctgaccggcggcgccgacaaggccgaggaggctgtccgatgaacgctcccctggctcccgcccgcccgaccgggatctccctcgccgtgcgcgactcgtccacgatgctgcgccgcaacctcctgcacgcgcggcgctacccgtccctcaccctgaacctgatgttcacgccgatcctgctgttgctgctcttcgtctacatcttcggcgacgtgatgagcgcgggcatcggcggcggacacgcggaccgctccgcgtacatcgcctacatcgtgccgggcctgttgctgatgaccatcggcaacaccatggtcggcaccgcggtgtccgtctccaacgacatgaccgagggcatcatcgcccgcttccgcacgatggcgatccaccgcggctccgtgctcatcgggcacgtcatcggcagcgcgctgcaggcgatcatcagcgtggtcttcgtcggcgccatcgccgtggccatcggcttccggtccaaggacgccacgcccctggagtggctcgcggcattcgccctgctcacgctgttcaccgtggcgctcacctggatcgcggtcggaatgggcctggtcagtccgagcgtcgaggcggccagcaacaacgccatgccgctggccttcctcccgctcatctccagcatgttcgtgccgatcgactcgatgccgggctggttccagccgatcgccgagtaccagccgttcacgccggtcatcgagaccgtgcgcggcctgctgctcggcaccgagatcggccacaacgggtggctctcgatcgcctggtgcctgggcctctccgcgctcggctacgtctgggcacagtcggtatacaaccgcgacccgaagtagtggatcctaggttctcatgagcggagaacgagatgacgttggaggggcaaggtcgcgctgattgctggggcaacacgtggagcggatcggggattgtctttcttcagctcgctgatgatatgctgacgctcaatgccgtttggcctccgactaacgaaaatcccgcatttggacggctgatccgattggcacggcggacggcgaatggcggagcagacgctcgtccgggggcaatgagatatgaaaaagcctgaactcaccgcgacgtatcgggccctggccagctagctagagtcgacctgcaggtccccggggatcggtcttgccttgctcgtcggtgatgtacttcaccagctccgcgaagtcgctcttcttgatggagcgcatggggacgtgcttggcaatcacgcgcaccccccggccgttttagcggctaaaaaagtcatggctctgccctcgggcggaccacgcccatcatgaccttgccaagctcgtcctgcttctcttcgatcttcgccagcagggcgaggatcgtggcatcaccgaaccgcgccgtgcgcgggtcgtcggtgagccagagtttcagcaggccgcccaggcggcccaggtcgccattgatgcgggccagctcgcggacgtgctcatagtccacgacgcccgtgattttgtagccctggccgacggccagcaggtaggccgacaggctcatgccggccgccgccgccttttcctcaatcgctcttcgttcgtctggaaggcagtacaccttgataggtgggctgcccttcctggttggcttggtttcatcagccatccgcttgccctcatctgttacgccggcggtagccggccagcctcgcagagcaggattcccgttgagcaccgccaggtgcgaataagggacagtgaagaaggaacacccgctcgcgggtgggcctacttcacctatcctgcccggctgacgccgttggatacaccaaggaaagtctacacgaaccctttggcaaaatcctgtatatcgtgcgaaaaaggatggatataccgaaaaaatcgctataatgaccccgaagcagggttatgcagcggaaaagatccgtcgacctgcaggcatgctggcgccggacggggcttcagacgtttcgggtgctgggttgttgtctctggacagtgatccatgggaaactactcagcaccaccaatgttcccaaaagaaagcgcaggtcagcgcccatgagccaagatctaggcatgtcgcccttcatcgctcccgacgtccctgagcaccttctagacactgttcgcgtcttcctgtacgcgcgtcagtctaagggccggtccgacggctcagacgtgtcgaccgaagcacagctagcggccggtcgtgcgttggtcgcgtctcgcaacgcccaggggggtgcgcgctgggtcgtggcaggtgagttcgtggacgtcgggcgctccggctgggacccgaacgtgacccgtgccgacttcgagcgcatgatgggcgaagtccgcgccggcgaaggtgacgttgtcgttgtgaatgagctttcccggctcactcgcaagggcgcccatgacgcgctcgaaatcgacaacgaattgaagaagcacggcgtgcgcttcatgtcggttcttgagccgttccttgacacgtctacccctatcggcgtcgccattttcgcgctgatcgctgcccttgcgaaacaggacagtgacctgaaggcggagcgcctgaagggtgcgaaagacgagattgccgcgctgggtggcgttcactcgtcttccgccccgttcggaatgcgcgccgtgcgcaagaaggtcgataatctcgtgatctccgttcttgagccggacgaagacaacccggatcacgtcgagctagttgagcgcatggcgaaaatgtcgttcgaaggcgtgtccgacaacgccattgcaacgaccttcgagaaggaaaagatcccgtcgcccggaatggctgagagacgcgccacggaaaagcgtcttgcgtccatcaaggcacgtcgcctgaacggcgctgaaaagccgatcatgtggcgcgctcaaacggtccgatggattctcaaccatcccgcaatcggcggtttcgcattcgagcgtgtgaagcacggtaaggcgcacatcaacgtcatacggcgcgaccccggcggcaagccgctaacgccccacacgggcattctcagcggctcgaagtggcttgagcttcaagagaagcgttccgggaagaatctcagcgaccggaagcctggggccgaagtcgaaccgacgcttctgagcgggtggcgtttcctggggtgccgaatctgcggcggctcaatgggtcagtcccagggtggccgtaagcgcaacggcgaccttgccgaaggcaattacatgtgcgccaacccgaaggggcacggcggcttgtcggtcaagcgcagcgaactggacgaattcgttgcttcgaaggtgtgggcacggctccgcacagccgacatggaagatgaacacgatcaggcatggattgccgccgctgcggagcgcttcgcccttcagcacgacctagcgggggtggccgatgagcggcgcgaacaacaggcgcacctagacaacgtgcggcgctccatcaaggaccttcaggcggaccgtaaggccggtctgtacgtcgggcgtgaagagctggaaacgtggcgctcaacggtgctgcaataccggtcctacgaagcggagtgcacgacccgactcgctgagcttgacgagaagatgaacggcagcacccgcgttccgtctgagtggttcagcggcgaagacccgacggccgaagggggcatctgggcaagctgggacgtgtacgagcgtcgggagttcctgagcttcttccttgactccgtcatggtcgaccgggggcgccaccctgagacgaagaaatacatccccctgaaggaccgtgtgacgctcaagtgggcggagctgctgaa

SEQ ID NO: 40 - DNA, 20 bp, Artificial Sequence
  gRNA targeting sequence
atgaggaccctatctggggg

SEQ ID NO: 41 - DNA, 20 bp, Artificial sequence
  gRNA targeting sequence
atgaggaccctatctggggg

SEQ ID NO: 42 - DNA, 20 bp, Artificial Sequence
  gRNA targeting sequence
cgagcggagagacgccggaa

SEQ ID NO: 43 - DNA, 20 bp, Artificial Sequence
  gRNA targeting sequence
gtggcgtcagcatttcaggg

SEQ ID NO: 44 - DNA, 20 bp, Artificial Sequence
  gRNA targeting sequence
gtcacgggatgactcgaaag

SEQ ID NO: 45 - DNA, 76 bp, Artificial Sequence
  CasX gNA scaffold sequence
gttttagagctagaaatagcaagttaaaataaggctagtccgttatcaacttgaaaaagtggcaccgagtcggtgc

SEQ ID NO: 46 - DNA, 13297 bp, Artificial Sequence
  pC2hyg-sg4-AZT010-kasO-editing vector
cggacgctcggactgggcgcgggattccagcagtaacccaggtccgccggccacctcacggcaggcagaccctcggctttcgcgccgggaccgccatgagaccgccacccggatgtccggggtggcggtctcatggcggtccctcagcggccctacgcgaccgctgtgtcgacgcggaggcagtctccggggtgctggccccagggctggagtaccggggcgagcttgcccttgcagcggcggcacacgggcgacgcggcgccgggcgggggagtcttgacgtcgacggtgaccggcttcggcttcaggcgcttccgaaggctgatcgtcgggcggatcgcctccttcttcggctgacgcactcggtcgagcgaagcggccagctcctccgtgcgggcctcgttggccttccggcgcgcctcgcggaaagcagcttcctcctcggacatgacctcgaacctcatctggtcagcgtcaaggtcgcccggcgcggccggcgcttccggggcgggcgggtccaggacgtccttgccccacaccaggccccaggactcgacgagccgccggacgcccggtaggccgtacgtctcggcgaccttgatgaggtcgaggcgacgtccggcgacgcgggcgatgtatcggtaccagatgtaggccgggatgaccgcgatggcgaccaggccctcggtgtcgtcggtgatctcctcctcggtgcggacgtcctgctggatgccgagttccttgatcagccggttcaggttctgcgaccggtagtgcttgcggacctggaacacgccgaactcgcgctcgcggtacttctcgacgaacgggccgggccgacgaagccgctgcagctcggcggccgccgcgtcgcccaggtcgagcggtcccatgcggtcgtcgccgcgaccggccttgaagttctgtccggccagctccaggccgatcttggcgacgccgcccttggtcttgtcgccgtccttgtagaggtagcgggcctgcttgcccgcatcgccgtcagcggcgtccgcgccgttgagtgggcgcacgtcggtgccgtggcccttgccctcacaggagcaaccgggccggtcgcacgtctcgctgacggtgtagccgcccgcggattcgaccccggcggcccaggctccggcgagtgcgtcgcggaacgcggcctgggcgtccgggccgagcacctcgcgggtgacccagagcgtgtgccagtgcaggtgccagccggagccccagccgaaggtgtcctcgaaggcccgctcgtagccgatgatcccgaagtcgtcgcgcatcgtgcgccagcggcggccggacgagccgtacgcgcccttccagccgtcgtgcaagaccgcgaccaggccgtgccgcattcccttgcggacggtgccgaacgccatgcgctcgaagtggcgcaacgtgttcgtgccaaggtgcagcccgtacccggcgtccgcgagaccgtcggcggcgagctgcacgttcgagccccgtacggccaggatgcggctcatgcaccacgggcaggtgtggacgttgttgcagcggcacgtgttgccccacgtcgcctcgcccggcttccacatcagctcggccgtcccggcagtgagccgggtcccgcagcccttgaacgcctcgttcagcgacaccgtctggtgccggtcccgccgggcgaaccgctcgtcgcgcgggtcctcccgcccggctgtcgcggcaccctcgtttggggtagaacccgttccagttacagcgctctgacctgcagtggacggagattttcccttactactaaagcccgcgtccggattacccgctgtagtcgtgcttgctacgctgcgtgactggtccgcaatgagacgctttgcgcgctttcggcaggcgtccgagcagtagattttggggcgcttcccggggatgtggacgatcggggtgccgcagtggcacttcggtccggcggggcgcggtggtgtcgacgcgctgttctctcgtacgctcgtcacagagcaaacgtcctcactcggcatgctgcgccggttcgggggcggcgagcccgggaggccaatcccgggctcgtgccatttctgggtcctgttgatcctggcattggtgtggccgttcattgcccctgctcgctcctgacgcgccgatagacgtccgatacgcccggtgctggtgggatttgataggtcggaagaagccccgcccgggcctgggcggggcttcctgtgcgtcaggacctcctcgtcgtgagcctcttcggcctatggacggagtgacctcgtgatccgttacagccgcgcgcgctcgcgtagagcggtctcatcagttccacgaacggtcctcttcgcagatcagggcgttggggcggagtctcaccaaggactacgtctgctggcgatttccgttacaccccgggcggtggccggcgcacacgcgcgcccgcgttgggcagtgcagaaagtgcagaaacctaggcgctgatggtccaggtccacggttcgtcgtcggcggcggcgcgggcggcggcgtcggccagggcgcgggcgagaccggctacggcgggcttgatgcgccggttgcgggcgaccttgagcagctagtatgcaggtcgacggatcttttccgctgcataaccctgcttcggggtcattatagcgattttttcggtatatccatcctttttcgcacgatatacaggattttgccaaagggttcgtgtagactttccttggtgtatccaacggcgtcagccgggcaggataggtgaagtaggcccacccgcgagcgggtgttccttcttcactgtcccttattcgcacctggcggtgctcaacgggaatcctgctctgcgaggctggccggctaccgccggcgtaacagatgagggcaagcggatggctgatgaaaccaagccaaccaggaagggcagcccacctatcaaggtgtactgccttccagacgaacgaagagcgattgaggaaaaggcggcggcggccggcatgagcctgtcggcctacctgctggccgtcggccagggctacaaaatcacgggcgtcgtggactatgagcacgtccgcgagctggccctgcaggcggaagtcaggtagacacgacttccgctagtccttgcaaggtctgctgacgtgaggcggggcggtcgtttttgaccgccctgccttcgtcatgtaggctcgctcgctgtgcctggcgtgtcatcagacgcccaggtcccggtgccgtgaggcccgggccatcgagccggtggtacgtggctgcggtccccttgtgagggctgcgcgccgtgtgctgtccggcgcgcacagccttgaatccacccgcgggggccggccggtctccgtgagctcgagtagacgacggagacgtaatggacaagaagtacagcatcggcctggacatcggcaccaacagcgtgggctgggcggtcatcaccgacgagtacaaggtcccctccaagaagttcaaggtcctgggcaacaccgaccggcactcgatcaagaagaacctgatcggcgccctgctcttcgacagcggcgaaaccgccgaggcgacccgcctgaagcggaccgcccgtcgccgctacacccggcgcaagaaccgcatctgctacctgcaggagatcttctccaacgagatggccaaggtcgacgactcgttcttccaccggctcgaggagagcttcctggtggaggaggacaagaagcacgagcgccacccgatcttcggcaacatcgtcgacgaggtggcctaccacgagaagtaccccaccatctaccacctccgcaagaagctggtcgactcgaccgacaaggcggacctgcggctcatctacctggccctcgcgcacatgatcaagttccgcggccacttcctcatcgagggcgacctgaacccggacaactccgacgtcgacaagctcttcatccagctggtgcagacctacaaccagctgttcgaggagaaccccatcaacgccagcggcgtcgacgccaaggcgatcctctccgcgcgcctgagcaagtcccggcgcctggagaacctcatcgcccagctgccgggcgagaagaagaacggcctcttcggcaacctgatcgcgctgtcgctcggcctgacccccaacttcaagagcaacttcgacctggccgaggacgcgaagctccagctgtccaaggacacctacgacgacgacctggacaacctgctcgcccagatcggcgaccagtacgcggacctcttcctggccgcgaagaacctctcggacgccatcctgctcagcgacatcctgcgggtcaacaccgagatcaccaaggccccgctgtcggcgagcatgatcaagcggtacgacgagcaccaccaggacctgaccctgctcaaggccctcgtgcgccagcagctgcccgagaagtacaaggagatcttcttcgaccagtccaagaacggctacgccggctacatcgacggcggcgcgtcgcaggaggagttctacaagttcatcaagccgatcctggagaagatggacggcaccgaggagctgctcgtcaagctgaaccgcgaggacctgctccgcaagcagcggaccttcgacaacggctccatcccgcaccagatccacctgggcgagctccacgccatcctccggcgccaggaggacttctaccccttcctgaaggacaaccgcgagaagatcgagaagatcctgaccttccggatcccgtactacgtcggccccctggcccgcggcaactcccggttcgcgtggatgacccggaagtcggaggaaaccatcaccccgtggaacttcgaggaggtcgtggacaagggcgcctccgcgcagtcgttcatcgagcgcatgaccaacttcgacaagaacctcccgaacgagaaggtcctgcccaagcacagcctgctctacgagtacttcaccgtgtacaacgagctgaccaaggtcaagtacgtgaccgagggcatgcggaagccggccttcctgtccggcgagcagaagaaggcgatcgtcgacctgctcttcaagaccaaccgcaaggtcaccgtgaagcagctgaaggaggactacttcaagaagatcgagtgcttcgactccgtcgagatctcgggcgtggaggaccgcttcaacgcctccctgggcacctaccacgacctgctcaagatcatcaaggacaaggacttcctcgacaacgaggagaacgaggacatcctggaggacatcgtcctcaccctgaccctcttcgaggaccgcgagatgatcgaggagcggctcaagacctacgcccacctgttcgacgacaaggtgatgaagcagctgaagcggcgccggtacaccggctggggccgcctctcccggaagctgatcaacggcatccgggacaagcagagcggcaagaccatcctggacttcctcaagtccgacggcttcgccaaccgcaacttcatgcagctcatccacgacgactcgctgaccttcaaggaggacatccagaaggcccaggtgtccggccagggcgacagcctccacgagcacatcgccaacctggcgggctccccggcgatcaagaagggcatcctccagaccgtcaaggtcgtggacgagctggtcaaggtgatgggccgccacaagcccgagaacatcgtgatcgagatggcccgggagaaccagaccacccagaagggccagaagaactcccgcgagcggatgaagcgcatcgaggagggcatcaaggagctcggctcgcagatcctgaaggagcacccggtcgagaacacccagctccagaacgagaagctgtacctctactacctgcagaacggccgcgacatgtacgtggaccaggagctcgacatcaaccggctgagcgactacgacgtcgaccacatcgtgccgcagtccttcctgaaggacgactcgatcgacaacaaggtcctgacccgctccgacaagaaccggggcaagtccgacaacgtgccctcggaggaggtcgtgaagaagatgaagaactactggcgccagctgctcaacgccaagctcatcacccagcgcaagttcgacaacctgaccaaggccgagcggggcggcctgtcggagctcgacaaggcgggcttcatcaagcgccagctcgtcgaaacccggcagatcaccaagcacgtggcccagatcctggacagccggatgaacaccaagtacgacgagaacgacaagctgatccgcgaggtcaaggtgatcaccctcaagagcaagctggtgtccgacttccgcaaggacttccagttctacaaggtccgggagatcaacaactaccaccacgcccacgacgcgtacctgaacgccgtcgtgggcaccgcgctgatcaagaagtacccgaagctggagtccgagttcgtctacggcgactacaaggtctacgacgtgcgcaagatgatcgccaagtcggagcaggagatcggcaaggccaccgcgaagtacttcttctacagcaacatcatgaacttcttcaagaccgagatcaccctggccaacggcgagatccgcaagcggcccctgatcgaaaccaacggcgaaaccggcgagatcgtctgggacaagggccgcgacttcgccaccgtccggaaggtgctgtccatgccgcaggtcaacatcgtcaagaaaaccgaggtgcagaccggcggcttcagcaaggagtccatcctccccaagcgcaactcggacaagctgatcgcccggaagaaggactgggacccgaagaagtacggcggcttcgacagccccaccgtcgcctactccgtgctggtcgtggcgaaggtcgagaagggcaagagcaagaagctgaagtccgtgaaggagctgctcggcatcaccatcatggagcgctcctcgttcgagaagaacccgatcgacttcctggaggccaagggctacaaggaggtcaagaaggacctcatcatcaagctgcccaagtactcgctgttcgagctcgagaacggccgcaagcggatgctcgccagcgcgggcgagctgcagaagggcaacgagctggccctcccgtccaagtacgtcaacttcctgtacctcgcgtcccactacgagaagctgaagggctcgcccgaggacaacgagcagaagcagctcttcgtggagcagcacaagcactacctggacgagatcatcgagcagatctcggagttcagcaagcgggtcatcctggccgacgcgaacctcgacaaggtgctgtccgcctacaacaagcaccgcgacaagccgatccgggagcaggcggagaacatcatccacctgttcaccctcaccaacctgggcgcccccgccgcgttcaagtacttcgacaccaccatcgaccgcaagcggtacaccagcaccaaggaggtcctcgacgcgaccctgatccaccagtccatcaccggcctgtacgaaacccgcatcgacctctcccagctcggcggcgactgagaattcagatctacgcgttccccgcaaaagcggcctttgactccctgcaagcctcagcgaccgaatatatcggttatgcgtgggcgatggttgttgtcattgtcggcgcaactatcggtatcaagctgtttaagaaattcacctcgaaagcaagctgataaaccgatacaattaaaggctccttttggagcctttttttgctgctccttcggtcggacgtgcgtctacgggcaccttaccgcagccgtcggctgtgcgacacggacggatcgggcgaactggccgatgctgggagaagcgcgctgctgtacggcgcgcaccgggtgcggagcccctcggcgagcggtgtgaaacttctgtgaatggcctgttcggttgctttttttatacggctgccagataaggcttgcagcatctgggcggctaccgctatgatcggggcgttcctgcaattcttagtgcgagtatctgaaaggggatacgcgtggcgtcagcatttcaggggttttagagctagaaatagcaagttaaaataaggctagtccgttatcaacttgaaaaagtggcaccgagtcggtgctttttactccatctggatttgttcagaacgctcggttgccgccgggcgttttttatcgcgggatctggggatccctgtgcgcgccgaccttcccggtgccggggagaacctccacgaccatgtactgagctgggtgtcgtaccggacgaattggcaccggcagaaggtcgcgggcgtcgcccccgggcccgtcgtccgttcacagcgccgtgggtgccgcacaccctcccgggcagggtgcagcacacccaggttcaggacacggcgcgccgttacggtggtgcgtatgacgagggacaacgaactcggtgacttccttcgcgcacgccgcgacctggtgtcgccggtggacgcgggcctgccgtggcacacctcccgccgggtgcccggactgcgccgggaagaggtcgcgctgctcgccggggtcagcacggactactacacgcggctggagcagggccgggaacggcacccctcggagcaggtcctggaagccgtcgcccgtgccctacgcctggacggcgacgccaccggatacctgttcaggctcgcccaaccggctccgcggaccgcggtcaccgacccggcgcggacggtcagcccggaactgacccggctgatgaaccacttcctggaccttcctgcctgcgtggtcagccccgccctggacatcctggccgccaatcccgcaggtcagcagctctacagcgggttcgaccggatggacaacctgctgcgcatggtcttcctggaccccgccgcccggcggttctaccgggactgggatcatgccgcccaaggcgtcgtcggcaacctccgggcgctgtcggcccccttcccgaacgacccgcgcgtcgcccaggtcgtcggggaagtgtcgctgcacagccccgcgttcgcggccctgtgggccagatacgaggtccggccccgcaccagcgaggacaaacacctgtggcacccgctggtgggcgggatgcgcctgcactacgaggcgttcaccgtcaccagcgcgcccggccagcagctgttcgtctactccgcggaaccgggcactcccagcgccgacgcgctggtcctgctgcggagcctggccggtgacacgctcgccgagcactctgcccccggcgtcgaaagccgtaccgcccgctgacgcctcgatctagagctagcatgcatatgaagctttgttcacattcgaacggtctctgctttgacaacatgctgtgcggtgttgtaaagtcgtggccaggagaatacgacagcgtgcaggactgggggagttgtgagcacgaacccctttgacgacgaggacggccgcttctacgtcgtgatcaacgatgaggagcagcactccctgtggccggtgttcgccgaggtgcccgcgggctggcgggtggtcttcggcgaggcggccagggccgagtgcctggagtacgtcgagcagaactggaccgacatgcgtccgaagagcctgcaggaggccatggcggcggactgaacgccgctcgcatccgacgggggagtggaacacgatgtccgtatctcgcctgtgccgagcgcccggcgcagagcggggcgtcgagccgatgcggcggaatccgtcgacatcgctcacggccaacggcggtgacgctcacgggccggccgggagccgtgggccggccggcggcgggctcgcggacccggccgggacgacgctgctcggtcccatgacggccggccgaagtggagacgtcccgtgagaaccgcgagcagtcacacggcgcggccggtgggcaccagcaatgagcccgagcggcgcatcgggaccagcctgcgcgagttcacgaactcctcggcgtggtggctcggcgaccggtacgcgtgggcggcgcggtggttcgacaccaccgcagaccggaaggcctcggcttcgcccaccacgccgaggtgacccgcctgtcgccaccggagcaggaccactgatcgagcgaggctcagcagcagaggcggtcgcgcaacgaactccgcggggcgttcgcgccggcctcgccgagcaggaccactggaccgctgtttccccgagcggcggcaacgagaaccaacgggtgccccgaccgaccgattcggcgggcgccgacaagcgccggcgaaaggccaccacgctcaccatcgagcgggtgaccgaggtgctcgacgccgctgagcggcgcaccaccccaagcctcactgcccaaaggctcaccgccccaaggcgccggacaagcccccgtccccgtggtgcgccgccggctcgcccgaccggacaccattcacatcggagtcagttgatgattcttcagggaaaacgggttgccctgccctcggcgcccgtcgtgcacaagcagttcgaggcgcacgtgaaggcgacccccgacgccgtcgccgtcgtctgcgccggacagcgggtgacgtacgcggaactggacgcgagggcgaaccggttcgcgcacttcctcgccgcgcgcggacacggccggggcgcgaaggtcggcgtctgcctcgactactcgaccgacatgctcgtcgccatcctcggcacgctgaaggcgggcgcggcctacgtaccgctcgatccggcaggccaggaaccgtaaaaaggccgcgttgctggcgtttttccataggctccgcccccctgacgagcatcacaaaaatcgacgctcaagtcagaggtggcgaaacccgacaggactataaagataccaggcgtttccccctggaagctccctcgtgcgctctcctgttccgaccctgccgcttaccggatacctgtccgcctttctcccttcgggaagcgtggcgctttctcatagctcacgctgtaggtatctcagttcggtgtaggtcgttcgctccaagctgggctgtgtgcacgacccccccgttcagcccgaccgctgcgccttatccggtaactatcgtcttgagtccaacccggtaagacacgacttatcgccactggcagcagccactggtaacaggattagcagagcgaggtatgtaggcggtgctacagagttcttgaagtggtggcctaactacggctacactagaagaacagtatttggtatctgcgctctgctgaagccagttaccttcggaaaaagagttggtagctcttgatccggcaaacaaaccaccgctggtagcggtggtttttttgtttgcaagcagcagattacgcgcagaaaaaaaggatctcaagaagatcctttgatcttttctacggggtctgacgctcagtggaacgaaaactcacgttaagggattttggtcatgagattatcaaaaaggatcttcacctagatccttttggttcatgtgcagctccatcagcaaaaggggatgataagtttatcaccaccgactatttgcaacagtgccgttgatcgtgctatgatcgactggtgacacaagaatccctgttacttctcgaccgtattgattcggatgattcctacgcgagcctgcggaacgaccaggaattctgggagccgctggcccgccgagccctggaggagctcgggctgccggtgccgccggtgctgcgggtgcccggcgagagcaccaaccccgtactggtcggcgagcccggcccggtgatcaagctgttcggcgagcactggtgcggtccggagagcctcgcgtcggagtcggaggcgtacgcggtcctggcggacgccccggtgccggtgccccgcctcctcggccgcggcgagctgcggcccggcaccggagcctggccgtggccctacctggtgatgagccggatgaccggcaccacctggcggtccgcgatggacggcacgaccgaccggaacgcgctgctcgccctggcccgcgaactcggccgggtgctcggccggctgcacagggtgccgctgaccgggaacaccgtgctcaccccccattccgaggtcttcccggaactgctgcgggaacgccgcgcggcgaccgtcgaggaccaccgcgggtggggctacctctcgccccggctgctggaccgcctggaggactggctgccggacgtggacacgctgctggccggccgcgaaccccggttcgtccacggcgacctgcacgggaccaacatcttcgtggacctggccgcgaccgaggtcaccgggatcgtcgacttcaccgacgtctatgcgggagactcccgctacagcctggtgcaactgcatctcaacgccttccggggcgaccgcgagatcctggccgcgctgctcgacggggcgcagtggaagcggaccgaggacttcgcccgcgaactgctcgccttcaccttcctgcacgacttcgaggtgttcgaggagaccccgctggatctctccggcttcaccgatccggaggaactggcgcagttcctctgggggccgccggacaccgcccccggcgcctgatgagctcatgagcggagaacgagatgacgttggaggggcaaggtcgcgctgattgctggggcaacacgtggagcggatcggggattgtctttcttcagctcgctgatgatatgctgacgctcaatgccgtttggcctccgactaacgaaaatcccgcatttggacggctgatccgattggcacggcggacggcgaatggcggagcagacgctcgtccgggggcaatgagatatgaaaaagcctgaactcaccgcgacgtatcgatgtcgaggttcctcaggggagccaccccagagaagccctcggagctgagcggagctatttccaaagccatgccagctagagacagtgcacaccgccaagcatctgcaaaaccctcgcctggagggaaagtgcaatgtacgtacgctggtttccctccagaaagggattctgcggcttctcaactttggaagaagaggcggaacgaactgctgtttcagcctactcatgtgaggaggctggtcctttaccctgatgcccgagggcatcagggtaaaggaccagcctcgccaactaggagcgctaccaaggcgaacacaacccaggacttggtagaacccttcgccggagaagttcagactcatcggcatgagcacccctcgccgcgcactcggcaccggtccgtcgaccaccaccaggacgtcgttgtcgacgtcggccccgcggctcctgcccgccgaacgcgtcgtcgtcgacggcctggtgctcatcgacgagcacccggagccaggtgaaaagcgccgg

SEQ ID NO: 47 - protein, 1368 aa, Artificial Sequence [sequence omitted]

SEQ ID NO: 48 - DNA, 4107 bp, Artificial Sequence
  Cas9 enodnuclease
atggacaagaagtacagcatcggcctggacatcggcaccaacagcgtgggctgggcggtcatcaccgacgagtacaaggtcccctccaagaagttcaaggtcctgggcaacaccgaccggcactcgatcaagaagaacctgatcggcgccctgctcttcgacagcggcgaaaccgccgaggcgacccgcctgaagcggaccgcccgtcgccgctacacccggcgcaagaaccgcatctgctacctgcaggagatcttctccaacgagatggccaaggtcgacgactcgttcttccaccggctcgaggagagcttcctggtggaggaggacaagaagcacgagcgccacccgatcttcggcaacatcgtcgacgaggtggcctaccacgagaagtaccccaccatctaccacctccgcaagaagctggtcgactcgaccgacaaggcggacctgcggctcatctacctggccctcgcgcacatgatcaagttccgcggccacttcctcatcgagggcgacctgaacccggacaactccgacgtcgacaagctcttcatccagctggtgcagacctacaaccagctgttcgaggagaaccccatcaacgccagcggcgtcgacgccaaggcgatcctctccgcgcgcctgagcaagtcccggcgcctggagaacctcatcgcccagctgccgggcgagaagaagaacggcctcttcggcaacctgatcgcgctgtcgctcggcctgacccccaacttcaagagcaacttcgacctggccgaggacgcgaagctccagctgtccaaggacacctacgacgacgacctggacaacctgctcgcccagatcggcgaccagtacgcggacctcttcctggccgcgaagaacctctcggacgccatcctgctcagcgacatcctgcgggtcaacaccgagatcaccaaggccccgctgtcggcgagcatgatcaagcggtacgacgagcaccaccaggacctgaccctgctcaaggccctcgtgcgccagcagctgcccgagaagtacaaggagatcttcttcgaccagtccaagaacggctacgccggctacatcgacggcggcgcgtcgcaggaggagttctacaagttcatcaagccgatcctggagaagatggacggcaccgaggagctgctcgtcaagctgaaccgcgaggacctgctccgcaagcagcggaccttcgacaacggctccatcccgcaccagatccacctgggcgagctccacgccatcctccggcgccaggaggacttctaccccttcctgaaggacaaccgcgagaagatcgagaagatcctgaccttccggatcccgtactacgtcggccccctggcccgcggcaactcccggttcgcgtggatgacccggaagtcggaggaaaccatcaccccgtggaacttcgaggaggtcgtggacaagggcgcctccgcgcagtcgttcatcgagcgcatgaccaacttcgacaagaacctcccgaacgagaaggtcctgcccaagcacagcctgctctacgagtacttcaccgtgtacaacgagctgaccaaggtcaagtacgtgaccgagggcatgcggaagccggccttcctgtccggcgagcagaagaaggcgatcgtcgacctgctcttcaagaccaaccgcaaggtcaccgtgaagcagctgaaggaggactacttcaagaagatcgagtgcttcgactccgtcgagatctcgggcgtggaggaccgcttcaacgcctccctgggcacctaccacgacctgctcaagatcatcaaggacaaggacttcctcgacaacgaggagaacgaggacatcctggaggacatcgtcctcaccctgaccctcttcgaggaccgcgagatgatcgaggagcggctcaagacctacgcccacctgttcgacgacaaggtgatgaagcagctgaagcggcgccggtacaccggctggggccgcctctcccggaagctgatcaacggcatccgggacaagcagagcggcaagaccatcctggacttcctcaagtccgacggcttcgccaaccgcaacttcatgcagctcatccacgacgactcgctgaccttcaaggaggacatccagaaggcccaggtgtccggccagggcgacagcctccacgagcacatcgccaacctggcgggctccccggcgatcaagaagggcatcctccagaccgtcaaggtcgtggacgagctggtcaaggtgatgggccgccacaagcccgagaacatcgtgatcgagatggcccgggagaaccagaccacccagaagggccagaagaactcccgcgagcggatgaagcgcatcgaggagggcatcaaggagctcggctcgcagatcctgaaggagcacccggtcgagaacacccagctccagaacgagaagctgtacctctactacctgcagaacggccgcgacatgtacgtggaccaggagctcgacatcaaccggctgagcgactacgacgtcgaccacatcgtgccgcagtccttcctgaaggacgactcgatcgacaacaaggtcctgacccgctccgacaagaaccggggcaagtccgacaacgtgccctcggaggaggtcgtgaagaagatgaagaactactggcgccagctgctcaacgccaagctcatcacccagcgcaagttcgacaacctgaccaaggccgagcggggcggcctgtcggagctcgacaaggcgggcttcatcaagcgccagctcgtcgaaacccggcagatcaccaagcacgtggcccagatcctggacagccggatgaacaccaagtacgacgagaacgacaagctgatccgcgaggtcaaggtgatcaccctcaagagcaagctggtgtccgacttccgcaaggacttccagttctacaaggtccgggagatcaacaactaccaccacgcccacgacgcgtacctgaacgccgtcgtgggcaccgcgctgatcaagaagtacccgaagctggagtccgagttcgtctacggcgactacaaggtctacgacgtgcgcaagatgatcgccaagtcggagcaggagatcggcaaggccaccgcgaagtacttcttctacagcaacatcatgaacttcttcaagaccgagatcaccctggccaacggcgagatccgcaagcggcccctgatcgaaaccaacggcgaaaccggcgagatcgtctgggacaagggccgcgacttcgccaccgtccggaaggtgctgtccatgccgcaggtcaacatcgtcaagaaaaccgaggtgcagaccggcggcttcagcaaggagtccatcctccccaagcgcaactcggacaagctgatcgcccggaagaaggactgggacccgaagaagtacggcggcttcgacagccccaccgtcgcctactccgtgctggtcgtggcgaaggtcgagaagggcaagagcaagaagctgaagtccgtgaaggagctgctcggcatcaccatcatggagcgctcctcgttcgagaagaacccgatcgacttcctggaggccaagggctacaaggaggtcaagaaggacctcatcatcaagctgcccaagtactcgctgttcgagctcgagaacggccgcaagcggatgctcgccagcgcgggcgagctgcagaagggcaacgagctggccctcccgtccaagtacgtcaacttcctgtacctcgcgtcccactacgagaagctgaagggctcgcccgaggacaacgagcagaagcagctcttcgtggagcagcacaagcactacctggacgagatcatcgagcagatctcggagttcagcaagcgggtcatcctggccgacgcgaacctcgacaaggtgctgtccgcctacaacaagcaccgcgacaagccgatccgggagcaggcggagaacatcatccacctgttcaccctcaccaacctgggcgcccccgccgcgttcaagtacttcgacaccaccatcgaccgcaagcggtacaccagcaccaaggaggtcctcgacgcgaccctgatccaccagtccatcaccggcctgtacgaaacccgcatcgacctctcccagctcggcggcgactga

SEQ ID NO: 49 - DNA, 121679 bp, Artificial Sequence
  modified BGC LT010-KasO
cgaccgggccagcgcccacgatcactacgtcatgcacaagagatccccttccccaacccacagccggatgggcacccggcaggacctctcgaaacgtgccagaccccaccgacatcggaccgacagcccccgatatgacaccgacaccacggctacgccgctcgatcccccctggtcaaagcgccgatcagccaggaggaggctttacaggtcccaaccccggggactgtcccgttcgattcctggcgtgaagtcggctctgcgacggccaagcgatcactgtcgtcacggggcgggcagctccgtcttctacggcgacaccgacaagcgctggagctgggtccatgtcgacgacctcgccgacgcctacgtccgcatcctcgacaaccccgcggctgtcgacggggagaccttcgtgatcgccgacgagcaacggctgaaggctcttagacgtgcagcgcgcggccgtccgtgccgccggcagactgagccgatcggtgccggagcccgctcgggctcgccccgccggctccccgtgggcgggggagacgggggcggccgatgcgggctaccgccatcccgggcgcgtcggcgtcccgcagcgcgaagtgaccgcggcggcgttccgagcggccgagacatccgaggattgccgaatcggcaagggatggcggggctcgcggcgacgacgctgaatcagctggtgcagcccgtgatcgaggtgtgcacgttctacggcgttctgccgtgggagctgtcgtctcggccactggaccagtacttcgccgggccgggcaggcggggccacaccacgatccgcaagaagatcaccagcgtcgaccagtacttcgcgttcctcgaacagcgctacgccgacgagatcctgcgccggttcggggcggcggtggagtcgccggtcgatgccttcaaccggccccgtcatcgcggggacttcgggctgcggatcccgccgtcccggacggagatgaaggccttcttcacctcatggcgccaagaactgtgctcggcgcgcaagtacccagtggcggtccgcaactacgtgatggcgaagaccgcctacatctcgggagtacgtgcgaccgagctgtgcctggtccggctcggcgatctgcactgggacaacggccagtgggggccgcttcctggtgcggggcaagggggctcgcggctcggggccgcgcgagcgggaggcattcatgttcgccgagggccgtgaactgctgtggtggtacagcgaggagatccggggccttttccccgacgacgcgctggacccctacgctccgctgttcccgtccgagcggttgccgtccgcgctcggcgcggacgtggggatcgcgccgccgatgcatgccgataccttccggcgtgcgctgcgccgtgcctcgctcgcgcatttgaagggcacggtgacggtgcttttcccgcatctgctgcggcatgcctgtgcgacgcataactacgagtcgggatgccgctttgggatgttcaggtgctattggggcacgagtggccgaccacaacggtgggttacctggctaccgcgaagggggatccggagcgggccagcctggagtcgtcccggcgtgctgtacgtcggctgagtggggagacgtgacggagtgaagtggaatctgcgctgggtggcggccggaagggacatctggcggcccagtgatctgaagaccgcgtttgaggcggtcgggttcacgccgtcgctgagcaaggtgtgtgcgctgtggtcgcaggcgccggtgactgtgcggctggatgatctcgacatgatctgtgccggcctggagtgcacggtcgcggacctgatggaggccgagtcgctcgccaccgaggagagcggcaggcaggacgggcagcaggcggtcggcgggagcctgcgctcgggcagcggtggccggccggtgccgaagcagtctggtggcaagggcggtctgcgtcgtctgccgccgaactgagcatggcgtcgcggaaacctgccgggtggcgcccgttgtgcacgttcacacgtgctcacggcaagctcatccgtggccgcgccatccctgaccttgcccaagtccagaccgtgctcgaggagatggccaccgagcgcggagtcggcgagacgtggcgcttccacaccagtgagggtctgcggcttgcgctggcctcccgaccgccggacgagcgcctggtgcgtcccgaggcgctcgtggatctgccgcagatggggcccaccctgcacgcggctctgaagcgggccgggatgcttgcgccgctcaggccgcggctggtgcccttctggatgtcagcggatgtggggaactgccgcgagtgcctggcctggacgaacgagcgtgatcagcggtgtgcgtcctgccagaactgggcgatcggtcggccgacgggcccgtgccaccgctgcggtcgaaagctgccactcagggacgatcaccgccgaagctgtgtgctgctgatcgccgagaccgagtacgacgtcgacggcatccttctcgacggaggcgaccagctctggttcggcggccccttcgccctgcacctgatctgtacacgcgcccgtgaaggcggtctgtacgggcgccggcgcctgcagatcaagcggcgcgaagccgtggcagcgtcgcgggccgctcgccccgtctccgtgcatctcgcgcggcccggccagctggagttgttccacctggcccgcgactggaaccggctggacgaacgccgccttcccgccctgacaccggcggccaaggaggtgctcgacggcttcgtcacccacatccgcgcccgcggctggacgatgcaggccctgggacccagcatccgcaccctacgtgtcctgctcgcctacctgggaggcgaagccccgctgctggaggaggatgtgcgcctgctggcccgccgcagctgcttcagcggcgcgcgggtgatcaattactggcgtccgaccggccgtctcggccccaaccacagggcaaacgcgtacctggcccgggcccggcgcgcggctgatgacgcaccgggctccttccgccccttggtacaccggtggatcgacgtcctgtgcgggcaggcctctcagcccagctggccacttgcgccttccacggtctcctcccatgtgcgcctggccgcacctgtgctgtgcgcgtggtgcgcggacggcgtcatcgatctgcgggccatcacacgggaagacatcggggcggcactccagccgaagcgggggcaggccgcatcgtctctggccaccgcactgcgctcactgttccgtgcgctcaaacgagaaaggctgatcttccgcgatccggcccgaggcgtctccaccacgagcgccgttaccctgcccgggccactgcccgacgaccgcctgcggggcacgctcgaccgcatgccgtcagtgcgtcaccagctcactttcgtcctggccgccgtgcacgcgctgagcggccatgaccagcgccatctgctcctggacgacctcgacctgagtcgcggcacgctcctcgtacggcgccgggacaagcccgttcacaccctctacctcgacgacctcaccttccgcctggcccgacggtggcgggccgaacgccatcgccgttggccgaccagcaccaacccctacctgctcgtgaccgtgtgcactgccgtcgacgacacccaccccgccgtcagcccccaggcgatcaccaaatcactacgccggctgggcctgcaggtcggacgcctgcggatggaccgcattctcgacgaggccaaacacactgccgaccccgtccacctcatccgtctcttcggcctgtccccttacacagccaggcagtacgtccgagccgcgcacccatacggcggaggcccgagcccactgtgatctgccgaaggcggaccgtgtgtggtcaacgtccgctcgccagacggaccatcgagagattggcgccgtcgacgcgggcatcggctggctcggtcgcactgggcggtctcccaagctgaccagactatggcgatctcagcgtgcgatctcctgacggagttgggtgagggcgcggtgaagtgtgcttttgaccgttccgggggccatgccgagagtggcggcggtctcgaacgtggtcatctgctcgcagtaccgaagcacgacgacgctgcgctgcttgggggtcagacgcttcaggacttccgtcaacaaggacctgtcggcgtgctggtcgctggtgtccttgacggacgcctcgggtatgtgtgcggtcggaatttcttccagcttccgtgcccgccaccactccgtgcgcgtgttgatcatgacgcggcgcaggtaggcgtccgcgagccgtttgtcggcgatgcgtccccactggcggtacgtgcgtaacagtgcgatctgcaggaggtcctgggcgtcgagtgggtcgccgaccaggcgccgggcactgcgcagcagagcgtcgtgccgggtacggacgtactcctcgaattccagcaccgcggtgcgatgcttgcggggatccatgcgtgggctcctttcacacgcgggcatgagcggtcagtacgtgctgtgtggcggagcgacaccgagtgggcaggcccgcccgtcccggcgtcggctcaggctcggtaccgtgccggccgagtcgtcaggtcgcggtgccgtagcagtagtcgcacgcgtagccgacggtggagcgataggtgcaggaatgaacggcggcagcttgcggggccgacttggtcgcctcgctgccggcggcggcttgaacagccatgacgggtacggtgacgagcagtcccgtggccaggaccagggcgctggcggcgcgggtgcggtggtacggcacgggcatgtccgtctccttgtgggaagcaggggtggttggggttggtggcgggctgtcagcagcccggcagatgggggaccttgggggccgctcccgcgtacgtagtggttgctcacccaggccgggtcgctgccgtgcagcagggtgaccttcgtccaccacttgtttcccgcaaccttggtggtgtgccggttggtctggcagaacgcccgcagggtcgcatgggacacccgtgtgacaacccggcaacccgtgcgcgggcactcccgcagggccacctgagtgcccttgatacggatcttcctcacgccggcggccgaggtgttgtcggacaccggcaccagggtggaggtctgggcggccacatgctgcgcgccctgcgcatcggcgtgtgcggaaccggccacggccaggccgccggccagagcgagggcggtcgcggccggcgcgaagctgctgcgcacagtagaggacattgctgtactcctctcactggcgccgcacttcgcggcgcacttgggtcgttacagcggcagaccgggccgatcttggggcggtccgtgacgggttttgggcaacggccttccgcccgaacagggaggaggaccgggctgctggccgctcccctcgcgccggccagcagcccggcctccggaattgacggcccgtcatgatgggccgcctaccggggaggtgggtcagtacgagcgcctagtggatcctttggcagccggtcagtacggctcgctctgtcgtttctcggacccgtcgtcaagtcccatgaccacgtggtagccaggcccgtcccagtaccaggcggtctgatggaccttgtcccttcgcagaaccccgtgcgacagagtcttgtactctccgtggcccttattgcgccacaggtagtaggcgcagatgccggcatccgtcctcttgcggaacgtggcgaccacgaaccagtgtccgggcgccgtcttcttggcgtcgagttgggccgtgcactgaagattggagaaacggatgtgccgcacgtcggagtagtactcgatgaccgtcggcgatgcgggccttgcctgagcgggttgccctgaagccgcagcgcccggcccgccgctcagggccagggcggccacggccagggcgatcggcttgctgatggtggtgatcgacaccaggtgctccttcgaacgaggggctgctgccttccggaacggccgcgtgtgagatggcggccggtgaacagccggacctgacgtgcagatccggtgccgtacgacctcgactttcccggccgcgccattgaatggacagccggagccgccaccctgatcaatggcgacgtcacaggtcacgggcacggcgcagcacgctgaccaaaaagcgcgcgagagccgttgacggcgtggcgtcgggaacgccctgccaggcgacgactgtggcagccaggggctgtggagaagctgaaggtttctgaaagaaaggctcgtgcgccaactcccggacggtgtccggctcttcaggttggccacaggtggattccctcatgctggagccatgcgcgtactggtggttgaggacgaccggcggatggcggagctgctgcggcgcggcctggtcggtgagggatgggcggtcgatgtcgtgcacgacggaccgtcggggctcgagcgggcgggcgagaacccgtacgacgcgatcgtgctggacgtgatgctgccgggcctgaacggatacggagtgtgcggccggctgcgtgaggcgggcatctgggcgccggtgctgatgctgacggcgatggacggggagtacgacgaggcggaaggcctggatgtcggtgcggacgactacgtgaccaagccgttctcgttcgtgacgctcctggcccggctgcgcgcgctgatgcggcgcggacagccgcaacgccccgccgtgctgcgcgtcggggacctggaggtggaccccgcggcccggcactgccgtcgcggcacggtgccggtggccctgacggtgcgggagttctcggtcctggagtacctggcgcggcgcggcggtcagacggtcacgaagacggagatcctggagcacgtctgggacgaccggttcgatggagacgtcaacgtggtcgaggtctacgtcagcgccctgcgccgcaagatcgacacccccttcggacggcggtccatccgcaccgtccggggggtcggctaccggctcgacgttgccccggagggcgcatgctgagggctcgtcgggccgggcgagccgagcgcggtctgcgcctgggcagcgtgcgactgcggttgacactggccgcgaccgccctggccgccgtcctgctgacgctggccgccgtcgccagcgccgtcgccgtgcgcaactcgttggtggcctcggcgatcgagcgggtcaccaacggcacaagcgccgaggtggccgagtcgcccgtgtgcgaaaccggtcccgacaacacgtcctgcgtcgaaccgcctcccgactcgtcccccgacccgcgtgacacgcgccccctggtccgaggcgaacacctgtccctgtggccatggaccgacccgcacgacgccacgttcgtcgcatcggaacaggccgacgggacgttcccgccggacgtctgggcggaccagcaacgcctgaacaccaccgtgtggcggctcgccggcggcacgctggtgctcaccctggtgactgccggcgggacatggctggtcgtcagccgggccctgaaaccgttggacggaatccgcaaacagttcgccgcactgagcctgagcagcctcgaccagcgcataccgacggcgcgcggcggccgggagttcacgcaactggtggcgacgatgaacaacgccctggaccggctcgatgaagcggccgcccggcaacggcaattcacctccgacgtcgcccacgaactgcgcaccccgctcgcctgtctgcgcgccgaactcgaactcgcgctcgccccctccgggaacgcccactggcccgacgccgcccgtgacgctctgcacgacactcttcatgtccaggacatcaccacgaacctgctgctcctggcccgcctcgacgcccaagccccacactcgaagaccctcctgaccaagcaagtcgacctgcccgacctgatccgcgacgcggtcgcccgccgtgacgtacccgatcacctgagcctggtcgtcgccgcacccgacgaacccgtggccgtgaccggccacccgggcctgctcgcccgcgtcctggccaaccttctcggcaacgccgaacgccacgcggccaccaccatcgccgtcgcgctcaccctggaccacgaacgccgacaagccgtactcgacgtggccaacgacggcccgcccatctcgcccgaacaccgggagaccatcttcgaacgcttcagtcggctcgacgacgcccgcacacgggacgccgggggcaccggcctcggcctggccatcgcccgccgcatcaccacactccaccacgggaccctcaccctcgcccccagccaggaagaccaaccaggcgcccggttcaccgtacgactgcccctcgcccacgaggacgtcctgccgctggtcaccgaactcctgcacgcttgggaccagcccgacgacatccccgaactcttcacccacaacgccggacaccagcccctcgaagacgtcgtgcccgacctggcacgcgccctcatcacagccggacgcgaccaccacctccacgcactgctcctccacgtcgcccggaaggcacccgcctgggaagtcaccggcctcgccgacatcctccgcgacgaaggcatgcccgcagccgccgacgaactgctcgccgcccgcaccgcacgtgttcgttgaaccggcatgaccatgggctgacttcgcgtcctcgggcccggcagcaagcggcgcacgggcacggcgtggacacgtcgaccacatggcggcgcccacgaccgctcgaccttcgctccacgatgggggcctggccacccgtcgagggatgtgcgcgcatcttgctgccgacgtccgactgctggtcagcgccgccgcccatgactgcgcgtggaggtctcaagtacccgcgggcgcgttcttgcaaaatacgggcggaacggcccaggatccgcagcgcggtagccggtggcaggaccgcgagctggccgatcgtttccaccccgaggcgccgaagttcgacagcctggcctcggcggatgccataaaggtcctcgatcgcctgtggcgccaggaactgctccgtttccgatggcgccacgtactggatgccgcccctccccgggcgggctgaagccatggccgcgaccgaccagcacggcccgatgcccaccacagtgtccagcccgaaccacgccagagcctgcagccgtatccgttgcgcgagctcgaccggccctgccgcaaacagccggagggcaccaccagcctgagcaacagcagcgccaggcggcaacgcctgcacgatcggagtgaaccgccccaacacggtcatcagcccgggtagcccgccgcgctgccgcagcagaacatgaacgaacgcggcgacctcggtcacctcttgatcacctccccagtcactcggcgaaccggacggcgccttgcctcatccggcggggaccagccggtgtgttcacgaactgcggtgtgcgggaatctgcgagctggtcggattcatctgagcctcggcccgaaagctgccgccatcgcggaacccgtcgtgcggcggagccggttcagtcctggtcgttcgcgttctgttcggcgtggcggtggcggtaggtgtcgatctcggccatgtgttcctcggcccaggaccggagcgcggcgagcggcacctcaagagacagccccagtgcggtgatccggtagtgcacgcggggagggacggtcggctggactcggcgggtgaccaggccgtcgcgggtgaggtttcgcagggtcgccgacagcatcttctgcgacacgccgggcatcctgcgctggagctcggcgaagcgcacctcctccggggcggcctcggagagcaccttgatcgccatggacgtccatttcgtgccgatcctgtcgagcagccggcgcgtcgggcagtccggttcgaagaggtccccgcgtgcggtgaggggacccgtcgggcgggtggtcacctggagctcaccgtctttcgtgaaagtgccgtcttggtacgtcaactctagtcacctaggttcaggttgtaaccaatggttatcgcttggagttgatgtgatgtcccacgtgtcgcccccgccgcccgcccgccacgccgccggtccgggcaaacatccggacgtggagatacgcaccgtcgccgtcaacggcgtggcactcagggtggccctcgccggcgagggccccgcactcctgctgctgcacggcttcccgcacacctgggaactgtggcgggcggtcatcggcccgctggcccgacgccaccgggtgatcgcaccggacctgcggtggctggccaccggccgagaagcgcccgcgggggagcccacgggagcgggatacgacgccgcgacactcgcacgggacgcagagtgcctgctggaagcactcggcgccacgcgcgccgctgtggccggcatcgacgcgggagcccctcccgccttcctgctcgccctgcggcgccccgacctcgtccggcgactggtgctgatggagtcgctcctcggcggactgccgagcggcggtacgggcgacgggtggcccgcggcgggcgggccccggtggtggttcggcttccactccgagcccggtctcgcggagtccgtgctgaccggccacgaggaccggtacatcggctggttcctcgaccaaggcacgctcggtcgcggcgtccccaccgcgctccgcgaggcgttcatcaccgcctacaccggtgaggacgtcctgtgccgcgccttctcctactaccgcgccctgcccgccagcgcccgacagctccaggacgccgccgccacggcccggctcacgatgcccaccatggccgtcggagcgcaccccatcggtgccgcgctcgaacagcaactgcgcccgatcgccgacgacctgatcggccatgtcctcgaggactgcggccacatcatcccgctggaccgccccgcggccctgctcgcactgctccagcccttcctggcggccgacatcaccacatgagggcggccatggccctgactccgatcgaaccggccgcgccggcagagggagatgacgcagcagagcctccaggaggcgaacacccggatggagggcgttgtcgaggcggcgtatgccacgcccggctccgagacgaagttcaagccgtactgggacgcgtacaggaccagcaccgacaaggccatcgagggcttgcagggcgtcagcgacgtgcagcaggtctcggacgctttcgtgggcccgacgaccggaccgccggagtagccgccaccggagtgaccgccgccgtggtggtggttgccgtgacgcgcgccgtggtggcggttgtgctcgccgcggtcggcccaggcgccgggccccttgtggtcgcgtcggccgacaagcgggtcgcgtacgccactgccgcgcgcacccggatgcgctcctcggtgctcatgggcgtgccctggacggcgtgccgttccagcgcggcgatggtgtcgcgggagatggcgagggctgcctcgatcgacatgctgatctctccgagctggaactgtgtcaccgggcttgtcgcctgccgagccgggttctcgaacgacgtggcgcgttcgggagcacgctcgacgaaggactccagtgcgccctgcgcgatgccgatgggggtgcccacgctcgcggagagcaggaacgggaagaccgcataggagtactcgacgactcctgcgttggccgcggaggcgtggtcgcctcgcagcagtccggggagaggcagggcccggtcgtgcgggacgaaaacgtcccgggcgaccgaggtgctgctgcccgtgccctgcatggcactcatgtgccagtcgtcgatgatctccatctgggtggtgggaacgacggcgagatacggctcgttggcgccgtcctcgtgggccaggacggctgccagaacgttccacgtggcgtgcaggacgcccgtgttccagggccaccttccggtcagcaggtagccgccttcggtgggtacgagtgttccgcccggcgctgacactcccgcgacgcgggctcctgggccgctgaacaccagttcctggaccgggtcggggaacaatgccgcccagtagccgcacacggcgtacaacgccatcacccacgatgtcgatccgcacgcacgggcgatggtgcgcaccacttcgaactctgtcgccgcgttcacctgaagaccgccgaaacgcctgggcaccgtgagccgggtgatgccaagggtttcgagagcctcgatgccggcctcaggcagccgccgcagccgttcggcgtcggcggcgttctcacgcagcatcgggagcaactcctcgacggaccggaccaaagcgtggtcgacacggtccgacagcgtgcggaactccggcacggtggtgctcacgtctcctccagaggggttcggctcaggaaacgcggcacctccgcgttgccgagcctgctgtgtcaccgggtgctgtccggcaccgcgggcactcggcggaccgtcatcctgatccggtcgactgctcacccgacaggtcaatgactgctcgatcggtgtcaggaccgccgtggcccgggaccggctgccgcccgttgccccgcgcccgccgcgtcgtcgcggacccggacgtgctccaggagttcgacgggtgcggcgatcaggttggggtcggtgtgggtgtagtaggaagcgtccgcgacgtacaccgtgtcgccgcggcgtgcgagggacgtggggttctgcagcccgtcggcggcggtgagcaccgcggtgtgagagccgtcgggacggatgagttcgacccggttgccggcgttgtcggcggccagcacgtcgtcgccgtggccggtgaaggtgaagtcgtcgactgctccgagtccggcggcgacggtgtgcacggtgccgggggtgccatggcggccgatggggacacgcagcagtgtgcccttgtccatggtggtgacccagacggcgttgtcgcggatcttgagtccgttggcgccgaatccgctcggtgtgcgtgcggcgagctcgggcgccttcttccagaccgccgcggctgtgccgtccggcgtcatgcgccagatggcgcccagcgaggaatcggtggcgtacaggtaaccgccatgcagggcaaggccgttggggacgctgttcgccggcagggggaccacccggctggggacgtcgcccgggcggagcctccacaggccggtgaggtcagcggtgccggcggaataaaggacgtagagggtgccgtcggggagccggacgatgccgccgatgaaagcacggccggtcaggggtgcgtcggttccggtcggaggggccgggagcgtgcccaggacgtgcgttccgcggtccgcggtgaggcggacgatctggtgcgcgaaggacatggtcacatcgagggaaccgttcggttcggtcgtcaggttctccggctgctggccggccgccaggtcgaggtgcctgatgatgtgcgggctgccgaggccgggtgtcccggcggacgcgggcagggcggcgccggcgaacgcgacgaccgtggccgtggcggtgatccgtattctgctgctgatgcgcatttctgttctcctgagaaccgtcctggacggacggacggacgggtgcgggactgcgggctgttgtggctgatgctgtggcccggcgccgcactggttcttgccgtgcgcggcgatggacagcggctcccacgcgcgccacgtcgccgaggaagaagcgcagcggcgggcgggccgcgtctacgatctgcggtacggcgtcccgtgtcgcgaccggatcgccctgcacggcattgcgctcccgccgggcttcctgggcctgctcgcggtgaactgggcgacctcttgagcgagtgactggctgaacgtttccagcgcccacttcgacgcggcgtacataccgacgttcgggaaggcgccgacgccgctgatcgagctgacctgaacgatgtgcccggcgcgctgtgcgcgcaggaggggcagcgccgcctgggtcacccacagcgcaccgaacaggttggtgtccaactgcgcgcgggcctcggactcgctgatttggcgccgatcggatcgagcaagggctgcgagcagtagaggttggccacggtcagcccgccacgccacggccggcgcgagggccaccgtacggctcaccgcctgtggcacggccgatccgggcacacccgctgtcctgtccatgttcttccttctccgcctctctgcgtcgctacgaagccggcgcctcgtacggaaacagacgctacgaacgccgtgccgggcggagaagggtgtgccgcaccccctcccaggcagggtgcggtacacccaggctcggcgagcggacgacctggttcgggcccacgacccgcgtgaagcgggcagcgtgctgggcggctccagcagcatcaacggtctcgtgcatctgcgcgggcaccggtccagctacgacgcctgggcgcggacggcaacgggaagcagaccgagggagtgtcgtggaccgggacgaacgtggtcgccggccggcggcagagcgcggccgacgcctgtctgcgcccggtactctcccgccccaacctgacgttgatcacccgcgcacacgtccagcggctggtgctcgacgggacccgctgccggggatcgggcccgcgacgcatccgcgggatctggggatccctgtgcgcgccgaccttcccggtgccggggagaacctccacgaccatgtactgagctgggtgtcgtaccggacgaattggcaccggcagaaggtcgcgggcgtcgcccccgggcccgtcgtccgttcacagcgccgtgggtgccgcacaccctcccgggcagggtgcagcacacccaggttcaggacacggcgcgccgttacggtggtgcgtatgacgagggacaacgaactcggtgacttccttcgcgcacgccgcgacctggtgtcgccggtggacgcgggcctgccgtggcacacctcccgccgggtgcccggactgcgccgggaagaggtcgcgctgctcgccggggtcagcacggactactacacgcggctggagcagggccgggaacggcacccctcggagcaggtcctggaagccgtcgcccgtgccctacgcctggacggcgacgccaccggatacctgttcaggctcgcccaaccggctccgcggaccgcggtcaccgacccggcgcggacggtcagcccggaactgacccggctgatgaaccacttcctggaccttcctgcctgcgtggtcagccccgccctggacatcctggccgccaatcccgcaggtcagcagctctacagcgggttcgaccggatggacaacctgctgcgcatggtcttcctggaccccgccgcccggcggttctaccgggactgggatcatgccgcccaaggcgtcgtcggcaacctccgggcgctgtcggcccccttcccgaacgacccgcgcgtcgcccaggtcgtcggggaagtgtcgctgcacagccccgcgttcgcggccctgtgggccagatacgaggtccggccccgcaccagcgaggacaaacacctgtggcacccgctggtgggcgggatgcgcctgcactacgaggcgttcaccgtcaccagcgcgcccggccagcagctgttcgtctactccgcggaaccgggcactcccagcgccgacgcgctggtcctgctgcggagcctggccggtgacacgctcgccgagcactctgcccccggcgtcgaaagccgtaccgcccgctgacgcctcgatctagagctagcatgcatatgaagctttgttcacattcgaacggtctctgctttgacaacatgctgtgcggtgttgtaaagtcgtggccaggagaatacgacagcgtgcaggactgggggagttgtgagcacgaacccctttgacgacgaggacggccgcttctacgtcgtgatcaacgatgaggagcagcactccctgtggccggtgttcgccgaggtgcccgcgggctggcgggtggtcttcggcgaggcggccagggccgagtgcctggagtacgtcgagcagaactggaccgacatgcgtccgaagagcctgcaggaggccatggcggcggactgaacgccgctcgcatccgacgggggagtggaacacgatgtccgtatctcgcctgtgccgagcgcccggcgcagagcggggcgtcgagccgatgcggcggaatccgtcgacatcgctcacggccaacggcggtgacgctcacgggccggccgggagccgtgggccggccggcggcgggctcgcggacccggccgggacgacgctgctcggtcccatgacggccggccgaagtggagacgtcccgtgagaaccgcgagcagtcacacggcgcggccggtgggcaccagcaatgagcccgagcggcgcatcgggaccagcctgcgcgagttcacgaactcctcggcgtggtggctcggcgaccggtacgcgtgggcggcgcggtggttcgacaccaccgcagaccggaaggcctcggcttcgcccaccacgccgaggtgacccgcctgtcgccaccggagcaggaccactgatcgagcgaggctcagcagcagaggcggtcgcgcaacgaactccgcggggcgttcgcgccggcctcgccgagcaggaccactggaccgctgtttccccgagcggcggcaacgagaaccaacgggtgccccgaccgaccgattcggcgggcgccgacaagcgccggcgaaaggccaccacgctcaccatcgagcgggtgaccgaggtgctcgacgccgctgagcggcgcaccaccccaagcctcactgcccaaaggctcaccgccccaaggcgccggacaagcccccgtccccgtggtgcgccgccggctcgcccgaccggacaccattcacatcggagtcagttgatgattcttcagggaaaacgggttgccctgccctcggcgcccgtcgtgcacaagcagttcgaggcgcacgtgaaggcgacccccgacgccgtcgccgtcgtctgcgccggacagcgggtgacgtacgcggaactggacgcgagggcgaaccggttcgcgcacttcctcgccgcgcgcggacacggccggggcgcgaaggtcggcgtctgcctcgactactcgaccgacatgctcgtcgccatcctcggcacgctgaaggcgggcgcggcctacgtaccgctcgatccggcctacccggcggcgagactccaactgctgctggggcagatccccggcctcgccctgatcgtggcctccccggcgacggccgggctggtggagtcggcggccgccgaggtcgtcgatccgcagcagctctccgatcagccggccggcctcccgacgacctctcctgacgtctccgtcaccggggacgacgtctgctacgcggtcttcacgtccgggtcgaccgggacaccgaagttgaccgcggtgcggcacgagggctggttcaacctgatgaactggctgatgctcgagtacggcctggaccgcgggtcgcacaacctggtcgtcagcgcgttcgggttcgacctctcccagcgcagcctgatgacgccgctgttctgcggtgccacccagtacctcatggcgagccggaacttcgacgcactgatggcgtaccgcatgctgaccgaccacgggatacgcacggtgcactgcgcctccagcacgctgtacctgctggtggactgggagaccgcacgcggaggtgaggcgctcacccggctggactacgtgctcttcggcggggaaccgctgaaggtcgaaaggatcgcggactgggcgcggcgcgaggggaacaggtgcaccctgctgcaccagtacggcgtcgccgagtgcacggatgtcgcgacgtcgtacgacctcgccgagtaccgtcccggcgaacatgacatcccgccggtgggcaggccggtccacaacacggagatccacatcctcgacgaggggatgcgtggtgtcggtgaggaggagtacggcgaggtctgcatctccggcagcagtgtcggcgcgggctatctcaacggcacgggtcccgagtccgagaagttcacgacggtcacggtcgacggcgagccgcgcaggctgtaccgcacgggcgaccgcggctacgtgacccgggccggggaactcgtcgtcgtcggccggatggacgcgcaggtgaaggtgcggggcatgcgcatcgaccccaccgacatcgagcgcgcgctcggcaggctggccggggtccgggaggccgccgtggtgatcggccacaccgacgccggcgaggtggaactggtcgcgttcatcgtcccgtcggaaggcgagctcgccgagagcgacgtgcgcgcccgcctccttcggacgctgccgcggaacatggttccggcccggtgcgtcaacatcccccggcttccgttgagtccgcacggaaaagtggaccgcaaggcgctggtcgacgcgtgccggaacgagttcgccgtgcgcggcacgacggcgtagccgccggaccttgatgacaaccgagaggactgtgatgattgccgacaaggtgcgtgccatttggtgccgcgaactccagcgcgatgacatatcggtcgacgacgatttcttcgcgctgggtggccagtccgtgatcatggccaaaatccagggtgctttcatcgaagagctgggcgtcgaagtcccggtggaccagatgttcctcaacccgacggtggcttcgatttcttcgtatatcgagtccatgggtgcggtgaccccctgacctcaggcgtcgttggcgcccttccatggttgtccggccatgactgcgttggaatccaagaaccactcggtatagagaggcgccatgtacgacgtcattgtcatcggtgcccgttgtgcgggttcgccgacggccatgcttttcgcgcgacagggttatcgtgtcctgctcctggagaaggcgcggttcccgcaggacacgctgtcctcgcactacatccacacggagggcgtggcgctgctcaaacggtgggggctgctcgacgcgctccgcgacgcgggctgccggccgatcgaccaccagagctacgaggcgccaggtgtccgcatcgacggcttctccctgccgatcgacggtcagcggacgacatatgcgccgaggcggtacgtgctcgacccgatcctcgcgggcggtgccgtggcggccggcgtggagttccgggagtcctgcgcggtcaacgatctggtgttcgagggcgaccgggtcgtcggggtgcggtacacgacgcccggcggcgccgaggcgacggaccgggcgcgcctcgtcgtcggcgcggacggcatgcgatcgctggtggcccgcaagaccggcgcgccgaacgtcatcgagcacccgcggatgacctgcacctactacagctactgggccggggttcccgcgcacttcgagctgtacgagcggcaggggcgctggatcggtgtcatacccaccaatgacgacctcgcgctgctcatggcctacttcccgcaggacgagttctccgagatccgcaaggcggtggaacccgcctacctcgatgccttccgcacgacggcgcccgagctgtacgagcggatgtcggcgggcgagcgcgtggagcagctgtacggcaccgggcaccaggagaactacttccgcaaggcattcgggcccgggtgggcgctggtcggtgacgcggtgaaccacaaggactccatcaccgcccgcggcatcaccgaagccttcgtccaggcccagtcgctcaccggccacatcggggagcggttgcacgacgacgcggcgctggaggacgcgctgcggcgctacgaggacgacctcgacgacgacgctctcagccactaccagggtgcgctcaacgtggccgagctcaagcccgaggggcgggccgagttgctgcggaaactggtcggtcaccaggagctgatcgaccggtacttctcgacgctgtcgggcgcctgctccatcgacgacttctacaacaccgaactcttgacgctgctcgaccagagctgagtgacggctcactccctggtagttctgccgatattggagacacaatgatcccgttgtcgttcgcgcagcgtcgactgtggttcgtggaccggttcgaaggtccttcgccggcctacaacggccctctcgccctgcggctgaccggtgagctgaacgtaggcgcacttcaggcggcggtcggcgacctcatcgaccggcacgaagccctccgcacggtcatcgtcgaggacgacgacggcgtcccgcaccagcgggtgctgccctccggtcagaagcggttcggcctgcgggtcgtcgaggccgcgacggaggaggagcgggcggcggcggtcgacgaggcggccaccgggaccttcgacctggccgccgacgtgccgatccgcgccaggctggtgcggcgcggaccgcgcgagcacaccctggtgctggtgatgcaccacatcgccgtggacggggagtccttcggaccgctgtgccgcgatctcatcaccgcctacacggcccgccaggagggcagggctccggcgtgggagccgctcccggtgcagtacgcggactacacgctgtggcagcgggacgtactcggggacgaagccgatccgcacagcctggcggccaggcaactggagtactggcggcggacgttggccgacctggcgcagccgctggcgttccccaccgatcgcccgcgcccgaagacgatgagccaccacggcgacatggtcccgttctcgatcgaccccggcctgctccggtccgtggagaagctcgccgcgcaggcggacaccacggtctcgatggtcatgcagtccgccctggcggtcctcctgcaccacctcggctgcggtgacgacgtgcccatcggcgcaccgatcgcgggtcgcaccgacgaggaactgcgcgagctcgtcgggttcttcgtcaacacctgggtgctgcgcgtcgacctctccgggaacccgaccttccgcgagctgctccagcgggtgcgggagcgggccctcgccgcgtacgacaaccaggacatgccgttcgagcggctggtggagctgctgaacccggaccggtccaccgcctacaaccccctcttccaggtgatgctcgcctggcagccccccataccggaaccggagttccccggcctcgacgtccagtccgagcggctcgagaccgcaacagccaagttcgacctgttcttcgacctgatcccgcacggttcgggcggggcgcggtgccgtctggagtaccgcaccgacctgttcgacagggacaccgtcgagggcatcgcgaaccgcttcgtccgtgtgctgggccggctcgtggccgacgcggaacgcaggatcggcggcatcgacgtactcgacgcggccgagcggggccggctgctcacccagttcaacgacaccgccacggcggtgcccgagctgacggttccggagctgttcgaaagccaggtcgccaggacgccggacgcaccggccgtcgtgtgcgacgaccgcacgctgacctaccgggagctggacgagcgggcagacggcgtcgctcgggagctggtgcgccggggtgccgggccggaggacctggtggtcctcgcgctgccgcgcacggaggacctggtggccgggctgctcggcatcctcaagtccggtgccgggtacctgccgatggacccgcagtacctcgccgggcgggccgagagcgtgctggccgaagcacgcccgcgcttcgtggtcaccgacaccaagacgtcgcaggacctgccgccgaacgacatgtcgagcatctacctcgatgaccgcgcgcagtgggacgcgcccgtgaagacgccggacgacgggggccggatctcgccgccgcgcccggacaacctggcgtacgtgatgtacacctccggctccacgggcaagcccaagggcgcggcgatcacccaccgcaacgtcgtcaacggagtgcgggaactgagtcgcgtcctggacgcgccgcccggctggcggatgctggccggcacctcggtgaacttcgacgtctcggtcttcgagctgctgaccaccctgtccaccggcggcaccgccgaggtggtgccgaacgcgctggcgctcggcgagcgggactcctgggacggccatgtgatcagcgcggtgccctcggtgctcggggaactggtcggccacctggagaagacgacggacgtgcgcacggtcgtgttcgcgggcgatgtccttccggcccggctggtgcggcaggtgcgcgaggccctgcccggcgtgcaggtggtgaactcctacggacagagcgagagcttctacgccaccacgttcgcccttccggcgtccgaggagtgggcggagagcgaggtcgcgccgatcggcacgccactgggcaacatgcgggcctacgtgctcggcccgggactcgccccggtgccgcagggcgcggtcggcgagctgtatgtggtggggacctgcctcggccgcggctaccacggccgcccgggcctgaccgctgagcgctacgtggcgaacccgttcggccccgcgggcgagcggatgtaccgcacgggcgacctggcgcgctggaacgcgcgtggccggctggagtgcctcggccgcggcgacggccaggtgaaggtgcgcggcttccgtatcgagacggccgaggtcgaagccgcgctcaccgcgcaccccgggatcagcgaggccgtggtgatcagccgcgacgtgtccccgggcgggcggcggctcgtcgcgtacgtggtgcacgccggcgagggagccgtcggtgacgacggcgccggcggcatcggcgatgtggacgtgctggccggtgcctcggccgccgagctgcgcacgttcgtcgcggcccggctgcccgactacatggtgccgtcggccttcgtggccctcgaccggatgccgctcgggccgaccggcaagctggaccgctcggcactccccgagccggagttcgtgggcgagggctaccgggagccgcgtaccgaagccgaggcgatcatcaccgtcgcgtacgcggacgtgctcggtgtggagcgggtcggcatcgacgacgacttcttcgcggtgggcggggacagcctgcgctcgatccaggtggtggcgcgggcccgggcccgcggcctggacctcaccacgcgggagatcttcgagtgccgcacggcggcccgcctcgccgaggtggcctccgcccgccaggaccgggcgcccgcgctcgcggagctcgagggcggcggcgtcgggccgatgccgttgcagccggtggcgcggcaggtgttcgagcacggcggcgggatgaaccgcttcgccatgtcgatggtgctcgagctgcccgcgggcatcgacgagcgtggcctcgccgcgacgctggacgccgtgctcgaccggcacgacctgctgcgcgcgcggctggtgcgcggtgacgagttctccctcgtcgcacagccccagggctcggtgcgggcggcggacctgatccgccgggtcggctgcgacggccggtgggacgacccgtcctcgctggaggcggcgaaggcggagctggacgacgctgtcgggcggctcgacccggaagccgggaccatggcggacttcgtctggttcgcccccgaggcggggacgggccggctgctcgtggtcctgcaccacctggtggtggacggcgtgtcctggcgcatcctcatgtcggacttcgccgaggcgtggcagcaggtccgggccggcaggacgcccgagctgcccgccgtcggcacctcggcccgccgctgggcgtcggccctggaggacgaggcgctctccgcggagcgggaagcggaactggcgtactggcgcgacctgctggaggtgcccgaccccgcactgggcacgcgggtgttcgacccggcggtggatgtgatgtccacggtcgacaccgtgcgggtgcaggtgcccgccgacgtcaccgaggcggtcctgaccaggcttcccgcggcgttcaagggcaccgggaccgatgtgctgctcgccgcgctcgccctggcggtcaaccggtggcgcggtgcggaccgttcggccctggtccgtctggagggccatgggcgtgaggaggacgtcgtccccggggccgacctctcccggaccgtcgggtggttcaccagcatgtacccggtccgggtcgacgtgtgcggggtggacctggccgacgtgctggcgggcggctccgcggccgggaaggcgatcaagctggtcaaggagcagttgcgccaggtcccggacaagggcgtcgggtacgggctgctgcggtatctgaacccggagaccgccgcacagctcgccgagtacccggtgccgcagatcgggttcaactacctcggccggatctccgactccgacgtccccgagcacctgcgcgcggacggatggggaccggcgtcatggtccgccgagctgatcgccatgcccgatccggatctgcccgcgctgtccgcgctcgaggtcgcctcggtcgccacggacaccgtggacggcacccggttgcagacggccttcatgttccccaccgggctgctgtcccgcgagcggatctccgaactggccgagctgtgggtggaggtgctgcacggcatggccgcgcacgcggcacagcccaggaccggcggcctcacgccctcggacgccccactggtctcggtgcggcaggacgagatcgaggcctgggagacgcgctacggccggctgaccgaggtgtggccgcaggcaccggggcagtccgggatccagttcgaggccgcgctcgccgacggctccttcgacgtctaccacatgcagttcgtgctccacctgtccgggcacgtggacccggagcgcatgcggtcggccgggcaggcgctcctcgaccgctatccgaacctgcgttccgcgttcctcgccgcggccggcggcgacccggtgcaggtcgtggcggaccacgtcgccctgccctggcggcacatcgatctgaccggtcgcgccgcggccgagcaggacgcggcgctcgaccaggccctcgccgacgaccgggccgaccggctcgaccccggcaagccgccgctgatgcgcctggccctgctcacctgcgggccgcggcaggcgaaactcatcatcacggcgcatcacaccctgttcgacggctggtcctcgccgttggtgatcaaggatctgatccggctgtactccacggccggcgggctcggcccggtccgcggctacggggactatctgacctggctgtccacgcgggaccggaaggcgtcggccgcccagtgggccgccgagctcaccggattcgaccagccgaccctcgtggcgccgaacgctcccgtccaggaagccgcgtccgccctcgggcgggtcgaggtaccgctgtcgatcgacaaggggcgcgaactcgcccggcgcgccgcggaactcggcgtcacgctgaacacgctcctgcagggcgcgtggggaatcctgctctcgaagctgaccgggcggcaggacgtggtgttcggagccgccgtcaacggtcgtccggccgagctggccggttcggacgagatggtgggcctgttcatcaacaccctgccgaccagggcgtcgtgccgaccggaccacagcgtcgcgcaggtcatcaccgatctgcagaaccggcagaccgcgctgctcgaccaccactactacgggctcgccgacatccagcgcgacgtcgggctgcccgccctgttcgacacgatcgtcgtgttcgagaactacccgatcgaccgtgcgggcatcgtcgacgcgaacaccgcggcgggattcacgatcgacgccatccggccgttcgcgggctcgcactacccgctcaccctcaacgcctccgacccctacctgcggacctccctcgactatcagaacaacctctacgaccgcgaggcggccgagctgatcgccgcccggctcgtccgggtcctcgaccaggtgctcgacgacccgacggtgccggtcggagccgtcgaggtgctgtcgcgggaggagtgggaccggctggtgcgccgggtcaacgacacggcgcggccggtggccgcggatacgctgccgggcgcgttcgaggcccaggtggcacgggaccccgaccgtgtcgcgttgatcggcgagcgggagaggctgacgtacggggagttcgaccggcgagccaatcagctggcgcactggctggtcgaacagggcgcgggacccgagcagttggtcgcggtgcgcatcccgcgttccgtcgacctgatggtggcgatctacgcggtggtcaaggcgggcgcggcctatgtgccgctggacaccgagctgcccgaggaccgggtgcggcatgtgctggacagcgccgagccgctgctggtgctcgacgggacgcttccggacgtgtccgcgtacccgaccacgaaccccgagcgggtgctgtcgccggacaacgccgcgtacgtcatcttcacctccggctcgaccggcggcccgaagggcgtgcaggtgtcgcaccgatcgatcatgaaccggttgaagtggggcctggcgcacttcgacgtcggcaccgaggaccgggtgctgctgagcacatcggcgagcttcgacgtgtcggtgccggagctgttcgcgccgttgcaggtgggcgccgccgtggtgatcgcgcgtccggacgggcggcgggatccgtcctatctggccgagctgatccggcgggagcgggtgaccggcgcggacttcgtgccctccctgctggaggcgttcgccggcgagcccgcggcgaagcggtgcgacagcctgcgctggatcgaggtcgcgggtgaggcgttcccggcggcgctggcgaacaaggtcgtcgatctgctgccggactgcggtgtgcacaacctctacgggcccaccgaggcggcggtggaggtcacggcgtggcagcacgtgccgggggcggaccgggtgccgatcggcgcgccggtctggaacacccaggtgtacgtgctggacgcggcgctgcgcccggtcgcgccgggagtggcgggcgagttgtacctcgccggtgccggcctcgcgcggggctacctcggccggagcgcgctgaccgcgaaccggttcgtcgcctgccccttcggccccgccggggcgcggatgtaccgcaccggagacctggtgcgctggaacgaggacggccaggtcgagtacatcggccgcaccgacttccaggtcaaggtccgcggattccgcatcgagctgagcgaggtggagtcggcgctgaccgcgcacccggacgtcgacaacgcggtggtcgtggtacgcgaggaccgcgccgacgaccagcggctggtcgcgtacgtggtgccgggaggcggcagggcggatccgtccgggctggatctcgcggccctgacggatctggtccgtgggcgtctgccggagtacatggtcccctcggcgatcgtgccgctcgccgcgttccccacgacagcgagcgggaagctcgaccgcaaggcgctccccgcccctgaccacaccgaagccacggccggacgagggccgcgcaaccaccacgaggaagtcctctgccggctgttcgccgagctgctcggcgtggaggagatcggcatcgacgtcgacttcttcgaccacggagggcattcgctgctggccacccggctgatcgggcgcatacgcagcgagttcgacgccgacgtgaaggtcacgacggtgttccgccatccgaccgtcgcccagctggccgagcagatccagaagctggccacgtcgaaacgtccccggctgcgacagatgaccgtacaggagaaccgtcgatgatcccgttgtcctttgcccagagccggatgtggatcctccacaagctggaaggcccgtccgcgacctacaacgtgccgttcgtgctgcgcctggaaggggtactggacacgacggccctggccacggcggtgacggacgtcacgaaccggcacgagagcctgcgcaccctggtcgtcgaggacgcgggcggcacggcgtcgcagcggatcgtgactcctgaggaggcggtcttccccttccgtgtggtcgacgtggccgcggacgcggtggacgcggcgatgcacgaggtcgcgtgcgagccgttcgacctggacacggagctgcccctgcggacgaccgtgctgcggatcgctccgcaggagcacgtcctggtgttcgtgttccaccacatagccgcggacggggcgtcggtggcgcccttcgtcagggacctggtgtcggcgtacacggcccgccatcgcggcagtgcaccgcagtggacgccgctgcccgtgcagtacaaggactacacgctgtggcagcggcagctcctgggtgacgaaaccgacccggagagcaccgcggcggagcagatcgcctactggaagaaagaactggccgaggtgccgcagccgctgcagctcccgctggacaggccacggccgacggcggccagccaccgcggcggcgaggtccccttcgtgctggcaccggagctgctgtccggggtgcagaagctcgccgcggaccatggtgccacggcgccgatggtggctcaggctgcgctggcggtgctgctgcacaagctgggtgcgggggaggacgtgccgatcggcagtccgatcgaagggcgcggggatgagcaactcgacgatctgatcgggttcttcgtcaacacctgggtgctgcgcgccgatctgtcgaggaacccgtcgttcgccgatctgctggagcaggtgcgggacaaggccctcgccgcgtacgacaaccaggacataccgttcgagcggctggtggagctgctcaacccggaccgcaccaccgcttacatgccgttgttccagacggcgctgggctggcagttcgtgtggggcgagatcgagatgccgggcctgcgggtcacccccatccccgtgggcaccggcaccgcgaagttcgacctgctcttcaacatcgtcccgaacgcgtccgggggcacgcgcggcctgctggagtacgcgacggatttgttcgaccacaccacggccgaacgcatcgtcgaccggttcgtgcgcatcctggagcaggtgctcgaggacccggcggtgccggtcggcgccatcgaggtgctgtcggcgcaggagcaggactggttgctccggggagccactgacacggcgctgtcggtgccggagcgaaccgtcgacgcgctcttctccgagcgggccgccgcgacgccggacgcggtggcgttggtgtgcggggacgtgacgctgacgtatcgggaggtggacgagcgagccaaccggctggctcgggtgctgaccgaacggggtgtggagccggagtcggtggtcgcggtggtggtgtcccgatcgccgcagtgggtggtcgcgctcttgggagtgatgaaggcgggcggggcgtatctgccggtggatccggcctatccggcggagcgcgtggcgttcatggtggcggattccggcgcggtgctggtgatcggggacgcggtctcggcgggacaggtgccggagttgtccgcgcccatgatccgcctggacgatccggacgtggtcgcggcgctggccggcgccgacccgggccccgtgaccgacgccgaccggcgcggtccggtggcggtggccaatacggcgtacgtcatctacacctcgggttcgaccgggacgccgaagggagtggcggtcagtcactcgggggtggccagcttggccgcgtcgcaggcggagcggctcgcggtgacgccggacagccgggtgttgcagttcgcctcgccgagcttcgacgcctcgctgtgggagtggagcatggcgctgctgacgggggccgcgctggtgctggccggcccggacgagctggccgcgggtgacccgctgatcgagacgatcgccgcccacggggtgacgcacgcgacgttgccgccggtggtgctggcggcgttgccgacgggggcgttgccgagtgtggagacgctggtggtcggaggttcggcgtcctcgccggaactggtggcccagtggtcggccgggcggcggatgatcaacggctacggcccgacggagatcaccgtgtgcgccgccatgagcacggcgatggtgggtgacggccgtactccgccgatcggccggccgatcgccaacacccaggcgtatgtgctggacacggcgctgcgcccggtcgcgcccggggtcgccggtgagctctacatcgccggcccggggctcgcccggggctacctcgggcggacgggcctgaccgcggaccggttcgtcgcctgccccttcggcgcgccgggcacccggatgtaccgctccggggacctggtgcgctggaaccaggacggcgagctcgagtacctcgggcgaaccgacttccaggtcaagatccggggtttccggatcgagctgggcgagatcgagcacgcgctgacgatgcaccccggtgtggcgcaggcggcggtcgtggtgaatgagaaccagctgggcgacaagcagcttgtggggtacctggtgcccaagccgtacgccgccgcggtggctggtgccgacgctcaggtggatgagtggcgccacctctacgacgacagttatgccgattccagcgatgaggagttgggcgaggacttccaagggtggaactccagctacaccggtgagccgatcccgcgtgagcagatgctggagtggcaggacgcggcggtggcacaggtgttgcggttcgagccgcggcgggtgctggagatcggtgtgggttccggtctgcttctggcgaagatcgtcgacgaggtcgaggagtactggggcaccgacatctcggccacggtggtggaccgggtccgggcgcaggccgcagaggccggatacggtgacagggtccgggtgagcgcccaaccggccgacgacatgtccgggctgcctcgcggccggttcgacaccgtggtgctcaactcggtggtgcagtacttcccgagcgtcgagtacctggaccaggtgctgcgccaggtgatggaactcctcgtggcgggcggccgcgtcatcgtcggtgacgtccgcaacgccgcgacacgcaccctcatgcagacggcggtgcagcgtacggcacacccgcacgcctcgcacgacgagttgcggacgctggtgaagagggagctgctcgccgagcgggaactggccatcgccccggagtggttcaccgagtgggcgggagacgactccgtcgcggtcgacatccggctgaagcccgggcaggcgcacaacgagctgacccggcaccgctatgaggtcgtcctgtacaagcgaccggctgacgtactcgacctggccggtgtgccgtcggtgccgtggggccgggaagtgcacgaccttgccgatctcggccgttgtgcggaccgggcgggcggtccggtgcgggtgaccgggatacccaacgcgcgtctggccgaggaggccgcactgacggtcgcgacgggtctcctcgacccggcgccccgctccggtgaaccggtcgatccgcaggaactgctccagtgggcacgcaaggacgatcgggacgtggttctcacctggtcgggggaggacacgcggtgcttcgacgcggtgctgctgcccgagcggcggaccgggcagccacatgtctcgggctcgttcgttccgagcggtgcgggcgggcgggtccgggcgaacaaccccgcgctggccaggtcgatcggtccgttgctcatcgagctgcccgagtacctgcgtgagcgtctgccggactacatggtccctcccgcgctcgtgccgctttcggagctgccgctgactccgaacgggaaactgaaccaccgggcgctgcccgcgccggactacgggcaggcagcgaccggtcgggcaccgcgcaatcaggtcgaggagaccctcagcgcgctgttcgccgaagtgctcggcgtggacaacgtcggcatcgacaacgacttcttcgccaccggcggggacagcattcgctccatccagatcgtcgcgcgggccagggcgcgtggcatcgaggtgagcacgcgggagatcttcgagcaccgtacggtcgcccggctcgcggacctggtcgaaggacgcgaggaagaacgcctcaccctggccgagctaccgggtggcggcgtgggatgggctccgctgatgccgacggcgaagcacgtgctcgcgctcggtggcggccttggccggctctgcatgtccatgatgttgaccctgcccgaaggcatcgaccgcgccggactggtggcgacggtgcagaccgttctcgaccggcacgacgtgctgcgttcccgactcgaccggacgcggcagggcctgtcgatcgagccggccggcagcgtggacgccggcgcgctgctgcgggaagtgcgctacggcgacgccgacgcgcacgccgagctggacgcggccgcggaccggctggacccggacgcgggcgtcatggcgcagttcgtgtggttcacctcggacacggacacggacgcggaccggttgctgatcgtgctgcaccacctggtcgtcgacggggtgtcgtggcggctcctcctgcccgacctggtctcggcctggaagcaggtccgggacggccgcaccccggaaccggcagggccgggcacctcgttgcgccggtgggcgcatgccctggccgacgaggcggcccgtcccgagcgggtggcggagctgcccgtgtggcggcagatcctgcgtggggacgagccggtactcggagcacgggagctggacccggcgcgcgatgtcgccgccaccgtggaaacggtgcgcgtccacgtgccggcggatgtcaccgagaccgtgctgaccaaggtgcccgcggtcttccggggcggtgtcgacgacgggctgctggcggcgctggcactggcgctgacccgctggcgtcggactcggggcgttcccgcttcgtcggctctggtccggctggaagggcacggccgggaagaggaggcggtgcccggcgcggatctgtcgcgcacgatcggttggttcaccacgatgtatccggtgcgccttgacctggccggcgtcgacgtggcggacgccttcgccggcggtccggccgccggccgggcgatcaagacggtcaaggagcagttgcgggcggttccgggcgacggtatcggcttcggcctgctgcgccacctcaacccggagaccgccgccgcgctgtccgcggaccgggaaccgcagatcgggttcaactacctcggccggacgtccggcacggatgtccccgaggagctgcgtggccagggctgggcaccggacaccacacagcgggacctgatcgccgcgccggacgcggacatgccggtgatgtcggcgctggagatcaacgcggtggccacgaacaccggcgccggtgacgagctgaccgcctacttcggcttcccgaccggtctgctctcccacgaggaggtgaccgagctggccgacctctgggtccaggcactgaccgccctggcccggcacgccgcgacacccgacgccggcggaatgaccccgacggacgcgcccctggtcgacgtgagccagcgggagatcgacacctgggaggctcggttcggccacctggccgaggtgtggccggtgacctcggcgcagtccgggatcctcttccattcgatgctggccggatcctcgttcgacgcctaccacgtgcaactggtgttccacatctccggtgacgtcgaccccgagcggatgagccgggccgggcagatgctgctcgagcgccacaccagcctccgtgcggcgttcgtcgacggggccgacggcgatctcgtgcaggtggtgccggcggcgggggtgaccctgccgtggcggtacctcgacctgaccgggtacggcgaggcggagcggaccgagacgttcgagcgcttcctcgcccaggaccaggccgcccacttcgacgtgggcaccccaccgctgatccggctggcactcgtcgccctcgagcccggccgggccgaactcgtgatgaccgtccatcactcgctggccgacggctggtcctcgcccttgctgctgcaggacctgctgctgctctacgcatcccacggcgacgcggccggtctgcccggcacgcggagctacggtgagttcctggcctggcgcgcacggcaggaccaggacgaggcggcacgggcgtgggcggccgagctcgacggggtcgatgaaccgaccctgctcgctccgggagccacgggcggcgacggactcgaccaggtcgaggtcgccctcccgctggacctgtccggcgaactcaaccggtgtgcctccgtgttgggcgtcaccatcaacaccttggtccagggcgcctgggcgctgctgctcggtcagctcaccggccgccaggacctggtgttcggcgccaccgtctccggtcgtccgcccgccgtgacggacgtcgagacgatggtcgggatgttcatcaacaccctgcccgtacgcgtggagtacgcgcccggcgacaccctcgccgaggtcctcacccggctgcagagccggcaggccggcctggtggagcaccactactacgggctcacggagatccagcagtccgtcggcctgcagaacctcttcgacacgctggtcgtcttcgagtcgtacccggtcgaccgggacggcctcagctccgccaccgacgccgcggacgggatcgccatcaccggtctgcgcccgtccaacggcacccactacccactggctctgatggcggcggtcgacacgcacctccagttcctcctccagtacacgcccggtgtcttcgaccgggacacggtggaggcgtacgcggcccgattcgtgcgcatcctggaacagctggcggccacccccgaactgaagaccgcgcagctcgatgtcctggagccggccgaacgcgaccgactcctcgtcgagttcaacgacacggccgtcccgactccggacgtctcggtcaacgcgctcgtcgaggcacaggcggcgcggaccccggacgaggtcgccgtggtcgccgagggcgagtcgctcacgtaccgcgaggtgaatgcccgggccgaccgcctggcgtgcgaactggccgcccgcggggtgggcccggagtcgatggtcgcggtgtcgctgccgcggtcggcggacctggtggtcgccctgctcgcggttttgaaggcgggcggcacgcatctgccggtcgatcccaggtaccccagccaccgcctcgcggccatcttcgaggaggcgcggccgcacctcgtgctgacggaccaggcgacggtcggcgtgctgccggagcacgacgccccggatgtcctcctcggctcactcgacctgtccggagacgtcaccggtctcgaaatcccgtcccacgcggatcagttggcgtacgtgatgtacacctccggctccacgggcaagcccaagggcgtcgccatcacccacggatgcgtggtcaacgccgtgctgcggctcgcccccatcgtcggcatggagccgggcaagcggctcctcgcggccgcgtcggtcaacttcgacatctcggtgttcgagatcttcacgaccctcgccaccggcggcgtggtcgacgtggtccaggacgtgctggtcctgggcgaccggaagggctggagcggcagcgtcatccacaccgtgccgtccgccttcgccgaactcgtcgacgacatcgccgaccgcaccagcgtggaaacgctcgtcttcgccggcgaggccctgccctcgtcgctcgtcgagaagacgcgggatgccttcccgggcgtacggatcgtcaacgcctacgggcagaccgagtcgttctacgccaccaccttcaccgtcgacggtgagaggccggtctcggcgggcagcgcgcccgccggcgccccgctgggcaacaatcgggcctacgtcctcggccccggcctgactccggtgccgccgggcgcggtcggcgagatatacatcggcgggaacgtggcccgcggctaccacggccgcgccgcgctgaccgccgagcgcttcgtccccgacccgttcggcccgaccggtgcgcgcatgtaccgcaccggtgacctgggccgtttcaatggcgagggccagctggagtacgtgggccgcggggacgcgcaggtcaaggtgcgcggcttccgcgtcgagcccgccgaggtcgaggccgcgctcagcgcgcaccccggcgtcgcgcagaccgccgtcatcgcccgcgacggccgcagcaccggcaagcaactggtcgcgtatgtcgtgcccgccgtcaccggcgacagtacgacgaccggtgaccctcgtggcccggagacgaaggagctgcacgacttcgtcgcggagcggctgccggacttcatggtgccgtccgccttcgtggtcctcgaccggctgccgctcgcgacgaacggcaagctggaccgggccgcgctgcccgagccggagtacaccggcgccgcctaccgggcgccccgcaccgcccgtgaggagtccctggccgcgctgttcgccgaggtgctcggcgtggaccgggtcggcatcgacgacggtttcttcgagctcggcgggcactccctgctcgccacccggctgatcagccgggcccgcgccgagatggggatagagatacccatccgcaagatcttcgacctgccgacggtggccgcgctcgccgcgtggtcggaggaatcggctgctccccgtcgccccggcctgcgcaagatgttcgtagaggagtagaagcaatgattccgctgtcattcgcacaacgccgtatgtggattctgcaccagatggagggcgggtcggagaactggaacatgccggcggccttccggctgaccggtgccctggaccaggccgccctcaccgcggcgatccgcgacgtggtcgaccggcacgagaccctgcgcaccgtctacgagacgaacgacgacggtgagctgtaccagcggatcctcccgacagcggaggccacgcctgaggtgccggtcatcgaggtggcgcccggggacgtgtccggcacgatcgaggaggccttcgggtaccggttcgacctggcggccgaacccccgctgcaggtacgcctgttccgctgctcaccccaggagcacgtcctggtcctggtcatccaccacatcgccacggacggcagctcggtcgcgcccctggtgcgggacctggccgcggcctacaccgcccgccgggacggccgggcgccggcgtgggagccgttgcccgtgcagtacaaggactacacgatgtggcagcgtgagctgctcggcgacgtggcggacccggacagtctcgccgcggcgcaggtcgcgtactggcgcaaggaactggccggggtgccgcagccgctgaacctgccgctggaccgcccgcggcccgtccaggcgagcgggcgcggctccacggtcggcctcatggtggagccggaggtggcgagcgggctgcagaagctggccgacgagcgcggggcgaccatgtcgatggtcctgcacgccgcactggcggtgctgctgcgcaagctcggcggcggggacgacgtgacgatcggcagctcgatcgccgggcggaccgaggaggcgctggccgatctggtcgggttcttcgtcaacacccaggtgctgcgggtggacctctgcggtgacccgtcgttcaccgatcttctcgcccaggtgcgacacaagtcgctggcggcctacgagcaccaggacgtgccgttcgacatgctggtcgaggcgatcaaccccgaacgctccgcggcctaccagccgctgttccaggtgatgctcggcctgcagaactacgagaggccggaactcgaactcgccggactcacgttggaggtcgagcagaccatcccctcgacctccaaggtcgacctgttcttcaacatgatcgtggacgactcgggggcgctgcggggcgacatctcctacgcgacggacgtgttcgaccgggagacggtcgaagccttcggggctcggttcgtgcgtgtcctggagcaactggtcggcgatccgggtatgtgcgtcggggatgtcgacgtgctgagcccgggggagcggcagcggctggtggtggaggtgaacgacaccgccgagccgaccctggagctggtggaggcggtgcgcaggcaggtgagggcgacaccggaggctctcgccgtcatcggcgaggaggagtcactcacctaccaggagctggaagcgcggtcgaacaggctggcgcactggctggccgacctcggtgtgcgggcggagtcgcgggtcgccgtgtgcctgccccggaccgtgaacctggtggtggcgctgcttgcggtgatcaaggccggtggagcctacgttccgatcgatccggaacacccgcgttcccggatcgactacatcctcgagcacgcggatccgctgctggtgctcgacgccgaggcgctggccggtgtggattggccggcgtatccggatgcggcaccggaggtggtcgtccggccggagaacgcccagtacgtgatctacacgtcggggtcgacgggcaagccgaagggcgtggcgatcccgcgcggcgcggtggcgaactacctggccacgacacagcggcggttcccgctgtcgtccgcggaccggatgctgttcagcacgacggtggccttcgacatggcgaacaccgagctgtacctcccgttcaccgccggcgcgaccatggtgatggcgggcaaggacaccgtcaccgacccgtcggccgtgctggagttgatacgccgccacggggtcaccgcggtgcaggccacgcccgccttctggcagatgctgttgatgcacgacccgaacgccgcgaagggtctgcggatcatcatcggcgcggaggccgtgccggtacgcctggccgagaccttggcgaagcaggccgccgaagtgttcaacatgtacggcccgaccgagacggtgacgtggtgcaccgaggcgcgcgtggaggtggggcagggtgcgccgatcgggaggccggtcgggaacacccaggtgtacgtgctcgactcgcggctgagcccggtttcgcgcggggtaccgggcgaactgtacatcgccggtgccgggatggcccgcgggtaccagggtcggccggagctgaccgcggagcggttcgtggcgtgcccgttcggtccggccggcgcgcggatgtaccgcaccggggacctcgtgcgctgggacgggaacggtcagctggagtacctcgagcgcacggacttccaggtgaagatccggggtttccggatcgagctcggggagatcgagcacgtgctgaccgggcatcccggcgtggcccaggcggcggccgtggtgcgggagaaccaggacggagacaagcgcatcgtgggttacgtgatacctgagcccgatgcctcgcaggccgacggcggtgtccaggcgctgctcgccgagctgcccgcctacctgcgggggcgtctgccggactacatgatgccctccacgctgatcccgctctcggaggtcccgctgaccccgaacgggaagctcgaccgcggagcactgccgtccgaggacatcaacgccgcggtcagtcgagagccgcgcaactcccacgaagagaggatgtgcgccctcttcggcgagctgctcggcatcgagcgggtcggtatcgacgacgacttcttcgagctgggcgggcactcgctcctggccacccggctcagcgctcgcatccgcggcgagttcgacatcgagatgcccctcaggacgatcatcaagtaccccacggcgggcgagttggccgcgctgttgctcgtcaccactcccgcggagtcctccgacccgctcgcggtcgtgctgccgttgaacagcgatcccggtacgggcaagccgccgctgtggttcttccacggaggaggcggcctcggctggacgtacttcagcttcgcgtcgtacgtgccggactggcccgcctatgccctgcaggcccgtggctccgacggcgtggacaagctggcggggtcggtgaaggagatggtcgaggactacgtcaccgagatgctgaagatccagccggaagggcccttccacctgatcggctggtcctacggcggcacggtcgtgcaggccgtcgcggaggcgctcgaccggcgtgggcacgagatcgccttcgtggccatcctggactcccagccgggtgggcacgggttcacggagatccatgccggcaaggccctgccggactaccggtccgaactcgaggaattcttcggccagtacatcggtaccgacaaccggcaagacttcctggacgccatggcgaaggtcctggccaacaaccacaccctcatgatggatttcgaatcgccggtctaccggggcgatgtgctgttcttcagcgcgacccttcaggaacgttcgtacgcgcatctgtggcggccctacgtcctcggttccatcgaggtgcacgacgtgcgtgccacgcaccacgaaatgaacatgcccgcggccgtggccgaggtcatggaggtcatcaagcgcaagctggcggagctgacggaatgaccggacagcgatctcccggaatcggttcaaagaaccatcgaatggatgattggggttggtcgtggtgaaggaacccgggatgtccgcggaaaacggcgatcaggtcacgctgttgtgcgtgccgttcgccggagcagggccttcgttcttctacccgtggcgggagttggccggcgaccggtggcgcgtggtctcggtcgagcttcccggcagggagaagcggctcctggagacgccgtaccggaatgtcgtcgaagcggcgaagaactcggtcgacgacattgtcgcggaactcggcgcgggggcgcggaccgtgctgttcgggcacagcctgggcgcggtgctcgcgtacgagctggtgcacctgctgagcacgcgtaacgtgcccgtcgagcggctggtcgtcagtggttcgccggggccgtggacacagcgagagaggcgggcgacgggactcccggacgaggagttcctcgcccgggtcgaggagttcgcggggttccggcacgaggccctggatcaccccgagatgcgtgaactgattctccccgtgctgcaggccgactgcgagatgcacgagaactacgttccgagcaccgacgaaccggtgtcggtgccgatctgttcgctgcggggcgactccgacggcctggtcaccgcggaagaggcgcggcagtggcgggacgcgactacgtcgagtgaattcagttatgtggagttcccgggcgatcacatgtacctggtcgatcgcggccgggaggtgctggacgtgatagaggcggaatccgcccgcagtcgctagaaatcctcgaagacgcgcatcaggtcttggcgtgatgcgagaccggggcccgaggccgcccaaggcccgcactctagtggtgcgggcctccgccggcggcccgaaaaacagtctcgaccagctcaccgcgctggtgaagacgcggctgaagcggatgcggtaccgcccctgcctccacgcccgggcaggcaggaattcccatcggacgcgccgccggctcggcccgacaggatgagccagtcacgtacgctggctgggaattcgtgtcctgtcggcgggacatgaatgcatgcgcaaggtccgcatgtgcctgcccgtcattcgggaccggtagatgaagcgcgaatacaaactccgtcacgcgccctcgcgaaagatcgcaggtagcgccccgcgaagacacctcgaacgcgtagagaaacggagtcgcgcaccggaaatccttggttgaacggtgtcggacgcggtggcatgctcctcaatgcgcctgaaggccagtcgatttcctgaacggaaggcaatcgtgatcacgcacatcgctcttttcaagctcaaggacggcatcgagcgctcctctccgtccgtggtcgaagccgagaagttcgccagggcagtcggcagccatgttccggaactcgtcgactggcgggtgggttggaatatggtcgaccgggacatttcctatgacttcgccgtgatcggggtgctgccagatctcgccgcgctggagaaatatcaggcgaacgcgttccaccaggagtccgtgcagaagtggcgagagatatccgactgggtcgtcgccgacctggaagacagctgaaggaggactgggtgttcacgcaatacgacccggaatccgcggcgctcacggacgagctgcgcggattgttcgacgagttcggcaagggaaagtggacggctgacgagctggaaacccatcagaccgccaagctgcgcacggtacttgcctatgtccgcgccaactcgccgttctaccgcgccaagctgaacgggatttcggacgagacgctcgccggactgcacgtcagcgatatccggaaccttcccttcaccaccaaggcggatctgcagcaggcgcagttcgacatgctctcgctgcccgtgtccgacgcctggaccttctacgagaccaccggcaccaccggaaagcccaccccgtgcccccgcaccaatggggacaccattcacaacaacaccgtgctcaccgcctattaccaggacatcttcgcgcagcacggcaaccggcaggtcatcggcatttccggccccacggaactgcacgccaccggggacacgttcggggacgtgtgccgcaacctggggcacgcggtggccaagatgtggccgcactcgccggtgatcggattcgaccgcgccctggaggtcctgcggctgctgccggtgaccgggctgttctgcaccccgggcatggccctgcggctggcccagaaagcggtcgaggcggggctggacccccggcgggacttctccctcgacctgctcatgctcaccggcgagctgatgtcgcccagcctccgggacaacatcggcgcgctctggggggccgaggctcacaactgcctctacgcgtcacaggaggcctccgtcctcgcggcggccacctccgacggcacgctgcgcatcgctccgctgatcaaccactacgaggtgatcgaccccggtaccggcgagcccgtggcgcccgaccccgacggggtgcgctacggcgaactcgtcgtcacgaacctctacaccggcgccaagcccctcatccgctaccgcaccggggacctggtgcggatgacggaggccgggcccggcgccgccgtaccggcgccggcgctggagcccgtcggacgtgtccgcgaccggctcgggctcaacgggcacctcgtcaacggctacgacctggagaacctgctgctccgtcgcttccgcggctacctcgactaccagatcaccgtgacccgtgacgacgcgggcacggacctgctttccctgacgctcaacgccgacccggaccggcactggggagacgacatcgaacgggccgtcgcggactgccgagaggaactggacaccgcgctgagcgtggccttcggtgaccccggccccatcaccagcaccggagccatggtgagctggaaggccgcgcgcgtggtggacctccgcgacccgggcgccgggacctcggtcgagtcccgctcggccgagcggatcgccggggcgagggcatgacggccggcccgtcccccgccgacccgccccccgtcggcgcctcccctccgcggcgacggtcgcagctcggcctcggggcatgggcgtacgaccgcggcgagttcgtttcggcgcaggctccgcggctgccgctctccacacagggcctgcactacgggaccgcggtgttcgagggaatccgtgcctaccgctcgcacgacgggctccacctgttccgggcgcacgaacactacgcgcgcatgctgcgcgcatgccggatgctgcgcatcacgggcatcccagcgacggtcggggaactcgtcgacatcactgtcgagttgctgcggatgaacgcgcacgacggtgacgtctacgtgcgtccactggcgcacaagctctctctgctgcctggcaccccgcccggggtctcgctggccggcgtgtccgacgcgctgtccatcaccacgttcggctatccgacggccggtgacgtccaggaggtgcgctgcgccctcagcgcgtggcggcgcccgccccgcgacacgcttcccgcgcaggcgaagatcgccggtggctatgtgaccagcgccctcgcctgcgacgaggcccgcgcggccggatacgacgacgccatcctcctggaccggtccggcaacgtcgccgaagcgaccaccgcgaacgtgttcgcggtcagggacggcgtcctcgtcaccccgccggacacgggcgacctgctgcccggcatcaccagggacaccgtgatcaccctgtgccgagaggccgggatgacggtcctggaacgccccctcagccccgcggacctctacaccgccgaggaggtgttcctcacctcgaccggcaaggaagtggcctccgtggtcgcgctgtccggccgggacatcggaagcggcaccgcaggaccggtcgcggcccgcgtcgccgcgctgtaccgcacggccgtgacggctcaggacgctcaggagccagccgggggcgagagccgtccggagtggctcactcccgttctgccgtctgagtacctcggcgcgcggccggcgcacgttccgccgacgcccccggagtttcccctcccaaccgaacacctacgccaagcaaagggacatgcggatgacgctgcatgacttcatctcactcctgcgccccggctccgaacagccctcggccgtcggcacgctcggcccgcccggcacgagcagcgaagtggcggcgaagcggtacgccgcccagatgtccgggctcgacgggccaaccatcgacgtccagctgttcgacacctacgagaaggcgggagaggcgctccaggcccgtgatgtgactcatgtcgtcgtggccaacgcctacaaggaaatcaacccgttctacatggacccggccgtcgagctggccggggtgttcgtgatggataccccgctgtacggaatcgccatggcccgcggaggcggaccggtgccggatgccccgaccgtcgcgagccacccctcgcccgagccgatcatcgcgcagctcctgccgcgtcgccacgcgacgtacaaggtgatccaccacgactccaccagcgccgccgcccgtgccgtcgtggagggaaccgccgatctcgcgctgaccaccgtgccggccgcgcagctgcacgacctggagttcatctcggggacccggcccatacgcatggtctggtcggtgttcggcagggcggtgcccacacgcaacaaggagacgagcccatgctcctcctgaacggagaccaggtacgagaggccctgccggtggccgaggcgcaccgggtggtggccgaggtgatgcgccgttacagcgcgggcgacgtcgtccagccggtgcgcaccgtgctcggatccggcctggacgcctcgctgttcgccgccatgccgtgccatgtcgccggcgagtcggacgcgggatacggcatgaaggcggtgctgcacgcgccaggcaacagcgcccgcggcctgccgacacacgtgggcatggtggtggtgttcgaccccgagaccgcgcagcccctggccctgatcaacggtgcggccgtgaccgcgctgcgcacggccgcggcctccgccgtggcgaccgaggccctggctgccccggacgccggcgacctggctctgatcggtgccggtacccaggcgcgcagccatctgctcgcgctgcgggacattcggccgctgcgccgggtgcggctgtggaaccggggccacgcgcgggccgaggagttcgtggcgtgggcgcgtgcggaggccgacgtcggcgtcgagctgacatccacgcccgcggacgcgctgcgcggcgccgacctggtgtgcacgacggtcgacacggccgaacccgtggtccgcgcagcggacttggcggacggcgtgcacgtcaacgccgtcggctcctccgtcccgggcaagcgcgagctcgactcgggcgcggtggcctcctgctcggtcttcgtggacagcagagagggagccctgcgcgagtcctccgagatcgcggcgcccgtggaggaggggctggtgcccgccgaccggccgctgcccgagatcggcgaggtgctgctgggcaagcaccccggccgtacgagccccgccgagcgcacgctctacaagtcgctgggcatggccgcgcaggacgtcgcctccggattcgccgtcgtccgtgccgcacggcgcctcggcatcggcaccgaagccgacttcacctgctgagaccccgcgtgagaggacacggtatgacggcactactgattggcaatgtcggagtcatcggcgacgagcggcgcatggcggagtaccgcgcgaaggtgctggacacgctgcggctctacggcggagggttcgtgatccggggtggggagtccgaggcactggaaggcgactggcagcccgagcacctgtcggtgatggggttccccacggccgagcacgcccgccgctggtacgactcgcccgaataccgcgccattgtcccgctccgtgacggcacgcacatggacctgatcctggtcgagggtgagggcgaatgacgccgccgtcccgccgtcggcgttccttctcgcaggtggacgtgttcaccgaggtcccctacctcggcaatcccgtcgccgtcgtcctggacggcgacgggatctgcgaccgggacatggcccggatcgcggagtggaccaacctgtccgagacgacgttcgtcgtcccgcccacctccgacgaggccgactacgggctgcggatcttcacgccgggcggtgagatcccgttcgccggtcaccccactctgggctccgcacacgcctggctggaggccggaggcactccgaagaagcccggagagctgacgcaggagtgcggcctcgggctcgtgaaggtgcgactctccggcgacgggctgggcttccgcgcccccgccctgcgccgcagcggtcccctggacgacgcgcacctggatcgcatcgcccgcgggctgcggatcgaccgcgcgcggatcgtcggccaccagtgggtcgacaacgggcccggctgggccgccgtacagctcgcctcggccgatgaggtgctggccctggagccggacgagcggcacatgcgcgagctgatagtgggtgtggtcggtgcccaccccgagggctcacccgtgcagttcgaggtccgcgccttcgcgctgcccaagggcgtgcgcgaagaccccgtcaccggaagcctcaccgcggggctcgcccagtggctcatcggcaacgggacggccccgcgcggcttccgggtcggccagggcgcacgcctgggacggcagggcgtgctcaccgtggaggcgcagggccaggacatatgggtcggcggcgcgagcgtgacctgcgtgcggggcgcccttcaggcgtgagaccggcggcttcttcctgtccgtggggtgtccgctgtcccgccgacgggacagcggcactcgcgcgactccgcaccaccgcgaacgaacggtccgcctgtttcgggatgccgtttcggggagttcacgctgttgaccgagagggtgacccgaccaggcagacgatggcagactggcggcgcatcgaggcgccattgttcagggcgatttctcatgagaaccatgactttgaatcacccctgccttggtaagtgcgtggacgcgatggttgtcacttgtcggattccgtgacgagaatagatgattgattctggcggcgacttgaccgccatatgcgaatatgccctgggggcagcgatggtaaaggaattaagcgcgccgacgccgggccggcggatttactcgctctggggtggcgacgccgatgcacggtgcctgctcgaatcgttggccgagaccgcacgcacgcgaagagaagatatcgcggtacaggacgagacacatgaactgacctatgggcggctcatgacgtgggcgagtaatatcgccgaccttctcgccggccacggtattcgtccgggcgaccgggtggcggtcacggggcctcgcggtgccgcagtcgtagcggcgatgctggccacggtgagcgcgggagcgacctatgtgcccctcgacgtcgagtatccggtcagacgcctcgagcacatggccgccgacagcgaggcccggctgcttctgttcagcggcgacgaaccggctttcgacctcagggcccaggcggtccgcatccccgacgcgccggacctgagcgaccaggaggccattgcggcgctgtcgcggctgtcctgccggccggacctccccgtgtacgtcatctacacctcgggctcgaccgggctgcccaagggcgtcgccctgccccatcgctgtgtcgacaacatggcggcctggcagtggcaacactcggtgcgcccggacctgcgcacggcccagttcgcaccgctcaacttcgacgtgtggttccaggaagtactcggaacgctgtgcggcggaggaacgctggtcgtcatgcccgagttcctccggcgcgaccccatcgccctcctggactggctcgccgaccaccgcatcgagcgcctgttcctcccgtacgtcgccctgcacatgctcgccgtggccgcggaggccgcggactcgctggagcacctcgccctggcggaggtgaacaccgcgggcgagcagctcgtgtgtacccccgcggtccgggagctcttccgccgcctgcccggctgtcggttgaacaaccactacggacagagcgagtccgccatggtgacggtgcacacgctcacgggctccagcgacgactggcccgcgctccccccgatcggacgtccgctgtcgggctgcgagatcctggtcgacccgaccgagccgggtgaaccgtcggtgggcgaactgctggttgccggcgcaccgctgtccgtgggctatctgcaccagcccgagctcaatgccgagcggtacgtcaccctcgaccggacgacgccgcaggggcaccgccgcgcgttccgcaccggggacctggtgcgcgtcgagggggacacggtgcacctcctcagccgtatcgacaacgaggtgaagatccgcggggtccgggtgaacccccttgaggtggacgcctgcctgctggagcagccggggatcgtcgaggcggtcaccgtggtggtggacatcgcccagggatcccggcagctgcgcgccgccgtgacgtcggacgtcggtgtgggcgagttcgacgccgcgagggtgctcaaagcgctcaccgagctgcttcccgagcagttcataccggtctcgatcaccgtactgccggaactgccgcacacccccagcgggaaggccgaccgggctgccgtcgccgccgcgctcgcgccgtcgtcgccatgacgccggacgagtggactaccgaggggatccagacctcgctgagaagcccaccccgctgatccttggcgacccggcgcgccgcccggcggcgcacacctcagcgtgccggcgacctgaagggacgtgtgcgcggcgaggagacccgcgacgtagtccgggaattcccggagaagctggataaacggaatcgatccgaacaggggtggcgcatgcaagacaacgacttcggcacaccgaccgagcggcggctcgcggacatctgggccgacatcctgcggctggacaacgtcaagcgtgaccaggacttcttcgacgccggcggagactcgttgctggctacgaaggtcgtcctacgggtgtgccgggaatgggacatcaaattcacggtcagggtcctgaacgacgcgccggtcctggccgacctggctgaacgcatcgaccagcgggtgacgaagtcgggacagccgtccgcgggcgcaccctcgccggcagcccgcgcgagccgggccggagcatgtttgtgggagatgcggccggggacggcgggcgccggacaggacacgttgctcctcctgccccatgcgggagggtcggcacagaactacgcctcgtgggcggacttcttccccaaggacctgcgcatcctcgcggcccagtatcccggtcgggcggcgcgcgccgacgagccggccgcggccgacctccatcacatcgttgacgagatcctcgatgcgctgggcgatgtcgaagggcggctctacgtcttcggccacagcatgggctcctacgtcgggtacgaactctgctggagacagcagttggcgagccgcccgcccgtggccctcttcgcctccggggccgttcctccgcacaggcaccggccgaacccggcgaccgaggaggagatcacggacgagtggctcatgaaactcctggacatgtacaacggcgttcctgacgacctcatgaattacccggaggtcataagccaggcgctgggcacgctgagatccgacgtagtgctcttccgcaactattcgtacggcgatcggcggcgtcggttggagatcccgatcgtggcgttcggcggagaacgcgacgaccttgtgcccgccgccgaggtggaacgctggcatgaactgggcgcagcggaatgtgccacgcacatcatcccgggcgggcatttctattacctcgacaatacggcgacggtcacggccgccatgtccaagtatctcgtgagcgttcatgacgggcagaaggaataggagatcgcgagcatgtccagccaagaattctccgggatcacggatgccgggacggtcatgtcggatcgccggaagatcgtgctggtggaacttcccacctacgagaacatcctgccgctcgcctcgggctacatccaggcgtacgcgcaggccgacgaggccgtcgcggcggaccacacgttcgagatcgtgtccctcccggtgtccgccgaccggcgtcagatggtccgggagctcgctgacagggacgcgtacctctatacgttcagctgctacatctggaacatgaagctggtccgctggctgctgaaggaactgcgcgcactgcgtcccgacgctcactacctgctgggcgggccacaggtgatgaaccacgccgcgacgtatctcagcgacggtgcggagaacgtctacgtgtgcaacggcgaaggggagcgaacgtccctagagttcatccggcagctcggttcgcagacgccggacatgagccaggtaccagggctcagcttctggtcctcgggcgaactcatcaccaccgaatcggcgcccaggatccagaatctgatggacattccgtcgccgttcctgaacggcgtcttcgaaggtcacgaattcagcttcgccatcatggagacgaaccgcggatgcccgttccgctgcaccttctgctactggggcgcggccacgaactccaaggtcaacaagtacgaagaggatcggatcaaggatgagctgaagtggatcagcgagcacgggtactccgcgctcatgatcgccgacgcgaactggggcctgtcgccccgcgacgtcaccctgagcgagtacatcgtcgagtgcagcgaggagaccggctacccgctgatcgttcacatggccgccgccaagaaccggcccgagcgcatggcggagatcaccgagatcttcgtgcgcggtggactgatggtgagccagcccatctcgctgcagacgatgaacgagtcggcgctggagatggtggaccggaagaacatccgcgaggacacctacatcgggctgcagcgcctgctccgggagaagcggatcagctcgtacgtggaaatgatctggccgctgcccggcgagaccctcgagtcgttcaaggacgggctgaccaggctgtgccgctcgtacgccgacaccatcatcgtctacccgcagttgttcctgcacaacacacccatgtacgcacagcgggaaaccctcggcatcatgaccgcggaggcggccagcgacgtgtccgaggcggaggtcgtgctcggcacgaaatgggtgaccgaggaagactgctacgagggctactgggtgaaccacgcgctgtacacgctgtacaacatgcgcgccctgttcgtactctcgggatatctcgacgcgaccgggatcatctcctacggtgacctgttcgccgagatgtcccgctacttccgcagcagaaccgactcggaggtgtgccagttcttcattcagtcgacgaaggacctggccaactacgacctgctgaacaccggtaagaccgcgcacctgatcctcagctcgcatcgcgaggagttcgaccggttgctggccgacttcgtcgccgcccaggactggtgggccgacccgatggcacgccaggcgttcgaaatggacctcctcacacgggcctacatctaccgtgaaccggtgcgtacgccggaccacgagttcaccgagatcgtcctgcgcggccagccggattcacggggcttcctggtcgaggtgtccgcggagctgttccgcctgctggtggcacgggagatgctcgaggccgtcgacgaggagtcggagcggatcaccctgcacatcgaccaccgcggcaggcagaagatgccgtaccagccgcagcggagcctggagcacaacgcgaactactgccagggcatggtgctgcggtcccgggagatcctgcccaccattcaggtcgcctcgacagaggttcccgcctccgtcgcgtgagctacggcgccggggcgaggccggataccccctgcggggcggtgacaccggccgtcgtcccggtgccttcttcagcgcaacacctcaggaccagtcgtacacgcacctgtggcggccgtacatcctcggtgcgatcgaaatgcgcgatgcgtgccacgcaccgcgaatggaccatgcccgcacccgtggcggaatagccggacctcgatcagcgggcaccccacaccgcgcgagagaggagaaaaagcaatgattccgctgtcattcgcacaacgccgtatgtggattctgcaccagatggagggaggggcggagacctggaacatgccggcggccttccggctgaccggatccctggaccaggccgccctcaccgcggcgatccgtgacgtggtcgaccggcacgagatcctgcgcaccgtctacgtgacgaacgacgacggtgagctgtaccagcggatcctcccgacagcggaggccacgcctgaggtgccggtcatcgaggtggcccccgaggacgtgtccggcgccgtcgaggaggccatgacgtacaggttcgacctggcggttatgtcctcggttccatcgtggtgcgtgacgtgcacgcccggcaccacgaaatgagcatgcccgaacccgtggccgaggtcatggaggtcatcaaccgcatgctggcggagccggcggaatgaccggacagtgatctccggggccgtggacacagcgcgagagacgggcgacgggactcccggacaaggagttcctcgcccggatcgagctcggtcctcgacgtgatcgaggctgtcgtccgtgcaccgcttgcaccgctctgaccaagggcgatgcgcgggaacacccgtgtcagcggtcgtgtcaggagtcatgacagagcggtgacagacgggtgacagacctggccgcgactgtggaggcatgagaagtacagcgattgcagtttcagggctgcggaaggcatacggagacaagaccgtgctcgacggcatcgatttcgatgtcgccgaagggtcgatcttctccctgctcggcccgaacggggcgggcaagacgacgacggtgaacgtcctggcgacgttgctgaaggccgacgccgggacggtgcacgtcgccgggcacgacgtggcgaccgcgaccaagcaggtgcgcgccgccatcggcgtgaccggtcagttcgccgcagtggacgagctgctctcgggccgggagaacctccagatgatggcggacctgaagcgcgtgcgctccggcgaggtcgtcacgcggctgctggagcggttcgacctggtggagtcggcggacaagatggcgtcgacctactccggcggtatgcgccggaagctggacctggcgatgacgctggtcggcaacccgcggatcatcttcctggacgagccgacgacgggtctcgacccgcgcagcaggcgcacgatgtgggggatcgtccgcgagttggtggccgacggcaccaccatcttcctcaccacccagtacctggacgaggccgacgagctcgccgaccagatcgcggtgctgagcgatggcaagctcgtcgccgaggggagcgccgaggagctgaagcggctcatccccggcgggcacgtgcggctgcgcttcaccgaccaggccgcgtaccggtcggccgcctccgcgctgcgcgacgtcaccacggacgacgacacgctgtcggtgcagatcccgagcgacggcacccagcgcgagctgcgctccatcctcgactggctggactcggtcggtatcgaggcggacgagctgaccgtgcacactcccgacctcgacgacgtcttcctcaccttgaccgagcgcacgagcaaggaggcgatctcgcagtgagcgctgtctcgacggcactggccgactcggcgatcatgctgcgtcgcaacctgaagcacaccatgcggaaccccgtcacggtgttcaacgcgatcctgttcccgatcgtgatcatgctcatgttcgtcaaggtgttcggcggcgccttcagcgtcggtcagcactacatcgactacgcgacgccgggcatgctcgtgatggccgtcagctacggcctcggggccaccgcgacgtccgtgaactccgacatgaccaagggcatcatcaaccggttcaagaccatggacgtctcccgcggagccatgctgaccggacacgtcgtcgtcaccacggtgcgctgcctggtggccgccgcggccatcatcggggtggccttcgcgatgggattcgacccccacgcgagcgccctcgactggctcggcgtgctcggtctcttcctgctcctcgccgtcggggccagctggctcaccgtcgccatgggcctgggcgcgaagagcgcggagtcggcgggcctggccgccgtgccgctgatcatgctgccgttcctgagcagcgcgttcgtgcccgcggacacgatgggggcaggggtgcggcagttcgcggagtaccagcccttcaccccgatcatcgagacactgcgcgggctgctgtcgggccaccacgcgtcgaccggccacacggtgtcggctcttgcctggtgcatcgggttggcgatcgtcgggtacctgtgggcggtctccacgttcaagaagcgagcgtgacctcgaccagctgagaccagctcgtgcgtgtcccctcccgtgccgcctcgacgaaccccgcgtcgccgaggcggcgccgcgctgtctgctcgatccgggccacgtccgtatgggagcggtccgccagcccgcgcacgctggtgctggccgcgagaagccgcgcggcctgctcgggctggtcgcggcgaagtgccaggtccgcgaccccgacgagcgcccgcgcgatcagcggcgcgtgtcccgcctcggacgccgccgcgcaggccgccgcgcggtacgctcgcgcctcgccgaggtcgtcggcgaggtagccgagcagatcgtgggtcaccgcgcggatgttcgcctgctccgcgtcgtcgcccagcagggccgtcgcggcgccgagttgcctgcgtgcctcctcggggcggccgccccaccgggcgagttccgccttcgacagggccagcacggccagtgcgcccggccaggcgacccgctccgcataccgctgtgcctcggcgatggcggccgcgctggcgtcctcgtcgccgagcagccagtacaactgcgcctgccgtgaccgcatctggatgatgtcctcgatggcaccgacctcggtgacgaccgcgatcgcctgctcgtagtgctcgcacgcggcggtgaactcgccgcgcgcggcgatccggtccgccagctcggtcagggcgaacgagattccgaaccgttcgccgatcgcccggaactcggcgagtgcccgctccaggtgcgcgtccacgtcccgcccgccctggccgagcatgatccgcatcttgcccagatgcagccgggccagcgcacgcgcccaggggtcctcgtcgtcgagcagcggttcgaacgcgggcaggaacgcgtcgggcccctgcagcatgcgtttcagcggggcgatgaaccccatcagcgggtggctgcgccggctgtgccgactgaaccggtacgccttgtcgatccactccgcgacctggtgttcgtcccccggcccggagctcaggaaatgcacgaccagcgcgtacatcacggcccggacctcgtcggccacctcgccgggcatcctgctggccgcggtgatcagttccaggccctcggacctgtgcccgccgagccaccagtaccagcccgcgcccgccgcgagccgcatcgccgcctgcgcctcgcccgccgcgagcgcgccgcgcatcgccgcaccgatgttgtcgtgctcggcctccagcgtggccagccacttcagttgctcggcgcggcgcagatgcggctccgcggtctcggcgagctcggtgaagcaggcgaggtgcgcgtggcgtgccagctccgcttcgcccgcctccgcgagccgctgcccggcgtactccttgatcgtgccgatcatgcggtagcgcggggcactgtcgccctcggcgcgcagcagcgacttctcggtcagcgaggtgagcagctcaagcacctgttcctgctcaaccgcggcgcccgcacagacccgttcggcagcgtccagactcgccccgccggagaacaccgagagccggcgcaggacgagccgctcggcgtcggtgagcagctcccaactccagtcgaccagcgcgcgcagcgtcttgtgccgcggcagcgcggtgcggcttccgctggtcagcaggcggaaccggtcgtcgagccggtgggcgagctggtcgatggacatggtgcgcaaccgggccgcggccagttctatcgccagcggcattccgtcgagagcccggcacacccgcgccatcgtggccagcgtgcgggcgtcggacgcgagatcccggcgcaccgctccggctcggtcccgcagcaaccgcacggcgggtgcggactcgatctcgtccgggctcgcgcccggctccggcagggccagcgggtcggcctgccacagcgcctccccggtgatgccgagcggttcgcggctcgtcgccaggatccgcagccgccggcactctccgagcacccggtgggcgaacaccgccgcggactcgaccacgtgctcgcagttgtccaggatcagcagcgcctcccgctcgcggatcgcggcgatgagccggtccgtcagctccacgttcggggccccgccgagcagggcgtcccgcaggccgagtccggcgagcgtcgcctgcgccacgtcggccacgtcgccgtccgcgccgatggcggccagctccaccagccaggccccgtccggcagatcgccgagcatcgcccgcgcggtctccgcagccagcctggtcttgcccgcgccgcccggcccgatcacggtggtgagccggtgctcggcgatgagttcgcggaccgcggcgacatcggcgcccttgcctatgaagctggtcagctcggcgcgcagattggtcttgcggttccgctcacgcgtccccagctcgccgcgcagcagcgcgacgtgcaacgcggacagctccggcgagggatcgacgcccagcgcgtcggccagggcctccttcgcacgctggtacacaaggagcgcctggctgtcgctaccggccgcgacaagggcgcgcatcagcgcggcgacgagccgttcccgcagcggatgcgcggccaccaggtcggtcagctccgtgaccagctccgcaccgcgcccgagggtgttctccgcgtcgaaccactcctccagggcggtcaggcgcaacccgtcgagccggacgaccgcggcgtcgaacgcggcgctgtcctgcgggccgctgtcctgcatggccgcaccgcgccacagctcgagggcctcgcgcagcagttgcgcccgccgggaggcgttctcggtgcgggcctggctcgcgacgacgaggcgctcgaaccgtacggcgtcgacggcgtcgggttccacgatcaaccggtagccatccgtatgcccctcgaccgctccgtacggcagtgccttccgcagccgggaaaccaagcgctgcagggcattcgtcgcgtcggcgggcgattgctccccccagatccagtcgacgagcgacgccttcgggaccacctgaccgggtctgagcgcgagggcgatcaacagtccgcgcagccgggcgcccggcacgtcgacccatacgccgtcgtccgtgcgcatctcgaatggacccagcatcgcgatctgcacccgccgattttgtcatgggcgcgtttggcgggcagccaactcgctgacgtgtgccgccgtgcacgcgcgcggcggccacgaccacggtgatgctcaggccgagcacaacggtggcgatgcctcttgaatcggataactcgccgtcaaacaccatgaaccgcttcgggcgcgcgtgatgcctgctcgcgtcggcggcgtcgcccggccgactgtgtcgacggacggcagccgaaaaggttttcacagtccagatcgaacggcgcagatcaaaacagaaatcaagactcggcgggcaggtatctgccttactgtcctgtcggcgggacagcaggtgcccggcaggatgtccgcactgtcatctcttgcactgggtttccctggccatttacgttggcgtcgcgatggcccctgggcgcaccaccgaaagcgggacacggctgctttccacctcaggaccgatgacacgcgacacgggccgacagcgctctcacccctgcccggtcggcgagcaccggacaccaccagcacggtgtgagttgaaaagaaccacgagacgctcgtccggccggtcaatggcgtgggcgggtattcccgttcggcggagaagcggagaaaggaaaggctggcaatgcagtcagaatcagaagccgcgcctgcgggtgcgtcggagtcgttcgtacaagaggtctcggcgctgtggggggaatacctcgactctcgtgaggtcggagcggacgacgacttctttgagctcggcggcaattcgctgatcggcatcaagatcatcgatcgggtggcccaggactacggcgtcgaactgtccgtgcgcgacttctacctggcgcagaccccggcccgggtcgccgagttgatcgagcggggaagggcgcggacgtgaggttgacgccgggtcccgcgcgcgacatcgacctcgaccgcgtcgacctgttcgacctggacctctacacctcgggtgacccgcatccgatctgggacgcgatgcgggcgaaggctcctttgcatcaccaagtccttccggacgggcgggagttctggtcggtgacccgctacgacgatgtctgccgggtgctcggcgaccaccgggagttcacgtcggagcgcggcacggtacccacccacctggggacggacgacgtcgcggccggcgtgctgctgacgtccaccgacccgccgcggcacaccgaggtccgcaggccgctcggcgccaagctcaccgcgcgggcggtgaagtcctgggaggactcgatccggcggtcgatcgtgcgcttcctcgaaccggcgctcgacggtggcaccttcgacctggccgagaaggcgttgctcctcccggcgatggtcacgggcccgctcctcgggatcccggagaaggactgggaggaactcgtccagctgaccgcgatggtgacggctccctcggaccagcacttccagcagggcagcgaagccgcgaccctggccatcgcccaccacgagctcgtctcctacgtcaaggagtgggtcaagacgcggcgggcggccggaggcgaggacgacagcctgctccaccacctcatgagcgtccgcccgggaggcgcgccgctgaccgacgaggagatcgccctcgacggctacagcattctgctgggcgccaacgtgacgacgccgcacaccgtctcgggtacggtgcaggccctcatcgagcggcccgagcagttcgagaaggcgcaggccgacccgtcgctgatcccgaacctggtcgaggaagggctgcgctggacgtcggccgcttgtaacttcatgcggtacgcggtggacgacgtccagatcggcgcaggcacgatcccggcccgtggggcggtcgtcgcgtggatcgggtcggcgaaccgggacgagtcccagttccccgatccgcatgtcttcgacatcacacgggacggcgcgaagcgccaggtcgccttcgggttcgggtcgcacttctgcatcggggcgccgctggcccggctgaccctgcgcgtcttcttcgaagaactgctccagcgattcggctcggtcgagctcgacggcgaaccgcagcacctgcggtcgtacttcatcgccgggatgacccacctgcccatcgtcgcccagaaacgaaagacgccatgacatccggctccaccaccgccacgtcgccgtggttcgtccggccgccgtccgccgagcaccccgcccggctcttctgcttcccgttctccgggtccggggcctcggccttcagcgcctggccggccgcgatcgacgacgtcgaggtctgcccggtgcagttccccggccgcgagaaccgccttgcccacccccactacggcacctacgagaacctcgccgccgacctggtcgaaatcctggtgccgcggctcgaccggccgttcgcgttcttcgggcactgcgcgggcgcgctgcccgcgttcgagaccgtggtccggctcgccgaactgggcctgccggggccgcagtgcctcttcgtgtcgggccagcccgcaccgcacgacgccgcgagcgaccggatgctcagcatgaccgagcccgagttgcgcgccgagttggagtcgttcctccgtggccgggggatcgaaccgcggccggacatgatcgatctgggcatggtcgtgctgctccgtgatctcgacgccgcgcgtgcttaccgtcggacggagccggtcgcggtgcggtgccccatcgtcgtgctgaactggcaggacgaccccgacgtgagccttgacgagctcgaggggtggcgtcggtactcggattcggtcgacatccgggtggtcgacggcggccactacgacttcatgaacgcgccggacgagctcctgaagcggttgacctcctggcggtgaaaggcggaagccggcctggaaggccgcagtgacaacgaccttcacgaattgatcgaccgcggatagccgtggctacacctgttcttcagagcaattgttgggggaggccctggtgggggacgtcgagaacttccggtcctacgcgcgacgcgccgtcggtgacgagcggacgccgcgcgagggggcgcacgagctggaggagtccgcgcgcgagcccatcgccgtcgtgggtatgtcgtgccgtctgcccaaggcccgcaatcccctcgccttctgggaactgctgcgcgacggcaggagcggcatcaccgacgtgccggccgaccgctgggacgcgcaccggctgctcgcggcggacgtcacggctcccggcaaggtcaccaccacgcgcggcggcttcctggacgacatcgccggtttcgacgccgacttcttcgggatcgccccgaacgaggccgcgatgatggaccctcagcagcgtctgatgctggaactcggctgggaggcgctggaggacgccggcatcgtccccgagcacctcgcggggacccgcacgggcgtcttcgtcggcgccatctgggacgactacgcggtccggctctacaagcacggcacccggcgcatcgaccgccactccgtgaccggactccaccgcagcatcatcgccaaccgcctttcctacacgctcggcctcaacggccccagcctcgccgtcgacgcggcccagtcctcgtcgctggtgtccgtgcacctggccgcggagagcctccgcgccggagagtgcacgctcgcgctcgcgggcggagtcaacctcacgatcgtccccgagagcaccatcggctcgaccaagttcggcggcctgtcaccggacggactgtgcaagaccttcgacgcccgggccaacggctacgtccgcggcgaaggcggcgcctacctggcgctcaagaccctgtcccgggcggtggcggacggcgaccggatctactgcgtgatcgagggcagcgccgtcaacaacgacggcgccacgcccggcctcacggtgcccagcgcacgcgcccaggaggaggtcatccgccgcgcgcacgaccgcgccggaacccgtcccgaggacgtccagtacgtcgagctccacggcaccggcacgcgcgtgggcgaccccatcgaggcggccgccctgggcgccgcactcggcaccgggcgccccgccgacgccccgctgcacgtggggtccgcgaagaccaacgtcggccatctggagggcgcggcgggcatcgtcggcctgctcaagaccatcctcagcatctggcaccgcgagctgccgcccagcctcaacttcgagacacccaaccccgacatcgccttcgacgaactccgcctgcgtgttcagcaggacctcacctcctggccccggcccgaccgcccactgatcgccggcaccagctccttcggcatgggcggtaccaactgtcacgtcgtactgcgtgagtggacggtcgacgactgtgcgtccgtgcaggacggaccggccgtcgtgacggacgggacggtgccgtggctggtgtcggcgaagtcgcgggcggcgctggaggagcaggcgcggcggctccttgaccacctggaccggcacccgcgggaaacgcccgctgaagtcggtcatgcgctggcggtgggccggtcggtgttcgatcaccgggcggtggtggtcggccgtgaaccggccgacttccggggcgcgttgagcgcgctggccgagggggagccttccgcgcaggtggttacgggtgcggtggccgcccgacccggcaagacggtgttcgtcttcccggggcaggggtcgcagtgggtcggtatgggcgtggagctcatggcgtccagccctgtcttcgccgaacacctgaccgcctgtgcggcggcgctggagccgtacaccggctggaacctcatcgacgtcctggcccaggcgcagggtgcccccgcgcttgagggcgacgatgtcatccagcccgcgctgtgggcggtgatgatctccctggcgcggctgtgggagcacctggggatcactccggacgcggtggtggggcactcccagggtgagatcgccgccgcgcacatcgccggcgtgctgtcgctggaggactccgcgcgcatcgtggcgttgcgttcgcaggctctcgtccagatcgcggggcacggcggcatggtttccctgccgctgcctttggccgatgcttcggagctgatcggacggtgggaggggcggctggtcgtcgccacggtcaatgggccgtcggccacggtggtggccggtgatacggacgcggtcgaggaactgcgagctcattgcgagaaggagggcttccgggctcgtcgtgtcccgatcgactacgcctctcacacgtctcacgtgcaccctcttcgcgaccgattgctggatgtcctggcgccgatcgagccgcgagaggcgagcatcgcgttctattccactgtcgccggtcatctgggcgggccgatggccgatgccacggtgatggacgcccggtactggtacgacaatctggccaccgccgtgcacttccaggccgccaccagcgctctgctggacgacgggcacacgctgttcatcgaggccagcccccaccccgtcctcacccaccccctgcaggagaccgtcgaggatcacgcgagcggtggcgaggtcgtcgtcaccggcaccctgcgccgggacgacggcacctggcagcgcgtgctgacctccctcgccaccgtccacacccacaccatcgcccccgtcgactggtcgggcttcttccccgccacccggcccacccacctcgacctgcccacctaccccttccaacggcgacgtcactggatcgacctgccgacggacggcgttgccgacgccgattccgacgcgtccgtcgatgtggtcgccgacgtggtcgccgaccggcccgaggacacggctccccctgccgagtccggcgcgtcgtcgccgctcctcgaccgcctcaggaaggcttcccggacccagcgggaacagatcctcaccgaccggatccgtgccgaggtcgcggccatcaccggacgtgtcacctcggagacggtggacggcgaccgcacgttcaaggacttcggtttcgactccttcgcctccgtcgaactgcggaaccgcctgagtgccctcaccggcctgaagttgccgacgacgctgctcttcaaccacccgacccccaccgccgtcgcccgctatctccggaccgaactcctgggctccgaggagtccggcagcatcgcccacggctccccgctcgccgccgccagcgcggacgaaccgatcgcgatcgtgggcatggcctgccgttatccaggagacgtccgcgcccccgaggacctttggcgcctcgtcagcgagggcgtcgacgccatcaccgacttccccgccgaccgcggctgggacaccgagaagctcctcgatcccgacccggaccgacccggtacgtcgtatgtcaccaagggcggattcctgtccgaagcggcggcgttcgaccccgcgttcttcgggatcggcccgcgcgaggcgacggcgatggacccgcagcagcggctgctcctggagacctcctgggaggcgatcgagcaggcgggcatcgacccggccgcgctgcgcggcagccagaccggcgtgttcgtcggcgccatgacccaggagtacggcccccacctgcacgacggcgtcgccgggttcgacgggtacctcttgacgggcaacaccgcgagcgtcgcctcgggccgcatctcgtacaccctcggtctgcagggcccggccgtgacggtggacaccgcctgctcctcctcgttggtctcgatgcacatggcggcccaggcgctgcgcaacggcgagtgctcgctggccctggcgggcggcgtcgccgtcatggccacgccgggcatgttcgtggagttcagccggcagcgcgggcttgcggcggacgggcggtgcaaggcgttcgccgaggcggcggacggcacggcctgggcggagggcgtgggcctgctgctgctggaacgcctctccgacgcgcggaggaacggccatcaggtgctggcggtcgtacgcggctcggcgatcaaccaggacggcgcgagcaacggcctgaccgcccccaacgggccctcgcaggagcgcgtgatacgccaggccctggccggcgcgggcctgtcggcgcaagaggtcgacgtcgtcgaggcccacgggaccgggaccgccctcggcgacccgatcgaggcgcaggcgctgatcgccacctacggcaaggaccggcccgaggaccggccgctgtggctgggctcgctgaagtcgaacatcggccactcccaggccgcggcgggcgtgggcggcgtcatcaagatggtcatggccatgcgtcacggcgtcctgccccagaccctccatgtggaccagccgtcctcgcacgtggactgggccgaaggagcggtggaactcctcaccgagaaccggacctggccggagagcgaccacccgcgacgggccgccatttcgtcgttcggtatcagcggcaccaacgcccatctcatcgtcgagcaggctccggagggcgagggtgccgccggtgagggtgtgccggagccggtggtggtgacggacgggacggtgccgtggctggtgtcggcgaagtcgcgggcggcgctggaggagcaggcgcggcggctgctggaccatctggatcgtcacccggaggcgacgcccgtcgagatcggtcacgcgctggcggcgagccgctccgtgttcgatcaccgggcggtgctggtcggccgtgaaccggatgatttccggggtgcgttgacggcgctggccgctggtgagccctcggcccgagtggtcgccggtacggctgcggcgcagccgggcaggacggtcttcgtctttcccgggcagggctcgcagtgggccggtatgggtgtggagctgatgcggacctcgccggtgttcgccgagcacctgaccgcctgcgcggcggcactggagccgcacaccggctggaacctggttgatgttctggcccaggagcagggcgctcccgcccttgagggcgatgcggtcatccagcccgctctgtgggcggtgatgatttccctggcgcggttgtgggagcacctggggatcactccggatgcggtggtgggtcattcgcagggtgagatcgccgccgcgcacatcgccggtgtgctgtcgttggaggactccgcgcgcatcgtggcgttgcgttcgcaggctctggttcagatcgcgggccgcagtggcatggtgtctttgcctctcccttcggccggtgcctccgagctgatcggccggtgggaggggcggttggtcgtggccacggtcaacgggccgtcggccaccgtggtcgccggtgacatcgccgcggtcgaggagctgctggctcactgtgagagcgagggtcttcgggcccggcgtgtcccgatcgactacgcctctcacacgtcgcatgtgcacccgctgcgtgagcagttgctggacaccctcgcttctgtcgaggcgcgcgcggccactgtcgcgttctattccacggtggccggtcatctgggcgggccgatggccgatacgacggtgatggacgccgagtactggtacgacaatctggccaccgccgtgcacttccaggccgccaccagcgcgctgctggacgacgggcacacgctgttcatcgaggtcagtccccaccccgtcctcacccaccccctccaggaaaccgcggaagaccacccgacgggcgagcggaccctggtcaccggcaccctgcgccgcgacgacggcacctggcagcgcgtgctgaccgcgctcgccaccgcccacacccacaccaccacccccgtcggctggtcggacttcttccccgccacccggcccacccacctcgacctgcccacctaccccttccagcaccagcgttactggctggagcggcccgagagcgcgggggacgcggccgcggccggacaggtgggggtcgaacacccgctgctcggtgcggcggtggagctggcgggcacggatgtcaccgtgctgaccggtcggttgtcgttgcagacgcacggctggctggccgaccacacgatctccggcaccgttctgctgcccggcacggccttcgtcgagatggcgctccgcgcgggtgacgaggtgggcgttgaccaccttgaggaactcgccctgcaggcaccgctcgtcctgccggcgaccggtggcgtccagctgcgcgtggaggccggtgagctcgacgacaccggacggcgttccgtgagcgtgtactcccggcccgacggccaggggacaggtgtgccctggacctgccatgccaccggcgtgctcgccaccagtggcccggcgccgtcctcatgggatccccgggtgtggccgccggccggggcggtgccggtggagaccgatgagctgtacccgtcactggccgtcctcggctatcagtacggccccgcattccagggggtgcggacggtgtggaagcggggcgacgaggtgtacgccgaggtggtgctgccgcaggagcggcacgccgaagtggccgccttcggcatccatcccgcgctgctggacgcggccctgcacgccgggctcgtcccggacccggtggccgggtgggaaccggagccgccgaggctgccgttcgtgtggtccgacgtgcggctgcacgcgaccgacgccacgaacgtgcgggtgcggctggccccggcgggccacgacgccctcgtgctggaggtcgccgacaccgagggcgcgcctgtcgcgtcggtcggttccttgatgatgcgtcccgctgaccccgcgaagctgggcggggcccgggacgggcaccacgacgcgctgttccgcatggaatgggtgagccgggcggtgcgggttgccgacgggaccccggtcggcccgtgggcgctggtgggcgacgacggactggggctcggcaccgttctggacgccgcacagatgcgtcgctacgcagacctgaccgcgctcaccggcgagttcgaggaactcgccaccaccgactccgcagacactttcgacgactcccggcccgaactcgtcctgttctgccacctgcccggggaaggcgccgcctccggcgatcctgccgccgcccgcgtcgagctgttcaaggcgctgtccctggtgcggtcgtggctcgccgacgagcggttcgccggcacacggctggcggtggtcacccgtggcgcggtggcggccgacgacgcggagcagccggacctcgcctccgcaccggtgtggggcctgctgcgcaccgcgcagacggagaacccggaccgtttcgtcctcgtcgacgtcgatgaggacgagcgttccctccgcgccctgcccgccgcgctcgcctgcggtgagccgcagttcgcggtgcgcgggggagaggtcctggtgcctcggctcgtccgggccgggtccgcggccgacggcgcgccgacacctccgcgggagcgggcggtggggcggccggacgcgaccatgccgtccgtgtgggatccggagggcacggtgctgatcaccggcggcaccggcacgctgggcgggcgcttcgcccggcacctggtgaccgagtacggggtgcggcggctgctgctggtcagccggcgggggcccggcgcggagggcgccgccgagctggtggagcggctggccgggctcggggcgacggccacggcggtggcgtgcgacgtctccgaccccgaggcgctgtccggcctgctggaggcgataccggccgagcacccgctgaccgcggtcgtgcacacggcgggtgtgctggacgacggcctggtctccgcgctgacgcccgagcggatggacgcggtgctgcggcccaaggcggacgcggcatggcacctgcaccggctcacccagggccgggacctgagggcgttcgtcctgttctcctcggtgatgggcgcgctcggcggcgcggggcagggcaactacgcggcggcgaatgtctacctcgacgcgctggccgcactccgccgggcccagggacttcccgccacgtcgctggcctggggcttctgggacgaacgcagcgagctgacgggggatctggaccaggcggacctggcccggatggcccgcgcgggcctggtgcccctgcggtcggacgaggggctcgccctgttcgacacggccctcgccctgggcgagcccacgctcgttcccgcacgcctggacaccacgcggctcgctaaggacgggaacgggccgctgcccgcggtactcggcgccctggtgcgtccccgtgccgcccggcgtaccgccgcggccggttcggcgggcggcgccacgggcggacagcggttcgccgggatgtccgcggccgacgcggagcgcgagctcatggaggcggtgcgcgcccacaccgcgaccgtgctggggcacgcgacgccggaggcggtccggccggacagcaggttcaaggacatcggcttcgactcgctgtcgtcggtggagctgcgcaaccgcctgagcgcggccttcggcctgcgcctgccggcgacagcggtcttcgaccatccgacgcccgccacgatggcccgccacctgcgcggcgaactgctcggcgaggcgacgcccgccgccgcacccgtggtcacggccgccgcgctggacgagcccgtggccatcgtgggcatgggatgccggcttcccggcggcgtcacctcccccgaggagctgtgggagctggtcgcgtccggcagccacgggatctcggggctgccgaccgaccgcggctgggacgtcgacgggctctacgaccccgaccccgaccggcggggcaagagctatgtccgtgaggcgggcttcctctacgacgcgggcgagttcgacgccgacttcttcggtatcgcgccccgcgaggcgctggccatggacccgcagcagcggctgctcctggagaccacctgggaggcgttcgagcgtgcgggcatccgcccggagtcggtgcacggcagccggacgggcgtgttcgtgggcgccatgccccaggagtacggccctcacctgcacgatgccaccgagggactggacggcctgctgctgaccggcaatacgaccagtgtgctctccggccgcctcgcctacttcctcggtcttgagggcccggccctcaccatcgacacggcgtgttcgtcgtccctggtggcgctgcaccaggcggcgcatgcgctgcgccagggggagtgcaccctcgcggtggccggcggcgtggccgtgatggccactccgggagtgctcaccgagttcagcaggcagcgcgctctcgcgcccgacggccggatcaagtcgttcgcggcctccgccgacggcacgggctggagtgagggcgtcggaatcctcctcctggagcggctctccgacgcgcggaagaacggccatcaggtgctggcggtcgtgcgcggctcggcggtcaaccaggacggcgcgagcaacggcctgaccgcccccaacgggccttcccaggagcgcgtcatccgccaggccctggccaacgcccggctcaccccggacgaggtcgacgtggtcgaggcgcacggcacgggtaccaagctgggtgacccgatcgaggcgcaggcgctgatcgccacctacggtcagaaccggcccgaggaccggccgctgtggctgggttcgctgaagtcgaacatcggccacagcatggcggccgccggcgtctccggtgtgatcaagatggtgatggccctgcggcacggggtactgccccgcacactgaacgtggacgagccgaccccgcacgtcgactggcccgcgggcgcggtggagctgctcaccgaggagcggtcctggccggacccgggacgcccgcgccgcgcggcggtctcctccttcggtatcagcggcaccaacgcccatctcatcgtcgagcaggctccggaggacaccggcgtcacccgtgagggtgtgccggagccggaggtggtcacggacgggacggtgccgtggctggtgtcggcgaagtcggaagccgcgctggcagagcaggcgcgacgtctcctcgaccacctcgaccgtcaccctggggtgacccccgccgaggtcggccacacgctggcggccagccgttcggtgttcgatcaccgggcggtgttgatcggccgtgaactggccgaccaccgaggcgcgttgaccgcgctggccgctggtgagccctccgcccgggtggtcaccggcacggtggcggcgcagccgggcaggacggtcttcgtctttcccgggcagggctcgcagtgggccggtatgggtgtggagctgatgcgcacctcgccggtgttcgcggagcacctcacggcgtgcgcggcggcgcttgagccgcacaccggctggagtctcatcgacgtcctcgaccagacgcagggcgccccagatctcgaccgcgtcgacgtcatccagcctgcgctgtgggccatgatgatctccttggcccggctgtgggagcacctgggcatcaccccggacgccgtagtgggccactcccagggtgagatcgccgcggcgcacatcgccggtgtgctgtcgctggaggactccgctcgcatcgtggccttgcgctcccgggccatcacccacatcgcgggcgacggcgggatggtctccctgccccttgccgtggcggacgccgaggaactcatcgcccggtgggaggagcgggtggtcgtggccgcggtcaacgggccgtcggccaccgtggttgccggtgacgccgacgcgctggcggagatcgtcacccactgcgagggcgaggacatccgggcccggaagatcccggtggactacgcctcccactccccgcacgtcgaggcgctccacgacgaactgctggagctgctggctccggtgcgcccgcgggaggcggaggtggcgttctactcgacggtgggcgaccacgccaagggcgcgatgagcgacacgacggcgatgggtgcggcgtactggtacgagaacctgcgcaccaccgtggccttcgaggcggccgcccgcgccctgctggacgacgggcacaccctgttcgtcgaggtcagcccccacccggtactcacccaccccctccaggagaccgtcgaggaccacacgggcgccggcgaggtcgccgtcaccggcaccctgcgccgcgacgacgacacctggcagcgcgtgctgaccgcgctcgccaccgcccacacccacaccaccgcccccgtcgactggtcgggcttcttccccgccacccggcccacccacctcgacctgcccacctaccccttccagcaccagcactactggatccagcagaccaccaccgcgaccgatccccacaccctcggcctgcacgccgccgaccacggcctgctcggtgccgccgtcgccctcgcggacggcgacggacacgtgttcacagggcacctgtcgctgcgcagccatccctggctggccgaccacgccgtccacgacacgtccctcctgcccggcaccgcgttcgtcgaactggccctccacgccggtcaggccaccgacaccccccacctggaagacctcaccctcgaagcccccctcaccctcccggccaccggcggcctccacctgcaggtgcacgtggccgcatccgacggcgacggccaccgggccctcaccatccactcccgacccgacgacgccacccccgacctgccctggacccgccacgccaacggcactctcgccccccagccgtccggcgcgccggacccggccgagtgggcggaactcgcggcctggccgccggccggcgccactcccgtgcccgccggcactctctacgaccatctcgccgaccgcggctaccgctacggcaccaccttccagggcctgaccgccgtctggcgccagggcggcgccctctacgccgaagtcaccctctccgacgacaccgacaacgccaccgccgccgaccactacggcatccaccccgcgctcttcgacgccgcgctccacccgatcgtcggcgccggccccgagcaggactcggaccaggtgctgctgccgttcgcctggtcgaacgtccagctgcacgccgtgggcgcccgggccctgcgcgtccagatcagccctgctgacgcggggacgctgcgcgtcaggctcgccgatcccaccgggcagccggtcgccgaagcggcatcgctggccctgcggcccatcaccaccgagcagttggcgaaggccgttgcggcgggaggagacgaccacctgttccgcctggcctggacccccgcgtccgtcacggaggagctcaagaccggccgtgtggcgttcctgggagccgccgttcccgaggcactggtcacatcgctgcccggcgatgtcgcggtcgagcgccacgagaagctggcaccgctgctggcggacgacaccgctctcctcccggacctggtcatcgcgactggcctgctggagcgttcccactcgggcgaggacgtccccggccccgcgcgcgaggccgtccagtacgccttggacctggtccaggagtggttggccgaggagcggctggccggcagccggctcgtgttcgtcaccaggcgagccgtcgcggtccatgccgacaccgagtcgcccagccccgcggacgccgctgtctggggcctgatccgtacggctgaggccgagaatccgggccgcttcaccctgatcgacctggcggacgagaaggccatcgcatccgagtcgttccgcgcggcgttgggaagcggcgaaccgcaggtggccgtgcgtgacggcgatcagcggctgtacgtcccccggctcgtacgggaggtgcagcccgacgacaccgccgtaccggagcccgccgcgggcggcacggtgctgatcaccggcggcacgggcaccctcggcacactgttcgcccgccattacgcgacggctcggcaggccggccatctgctgttgaccagccgacgcggcccggacgctccgggcgcgcgcgaactcgccgccgaactgaccgaactgggtgtgaaggtgaccgtcgtcgcctgcgacaccgccgaccgcggcgccctcgccgcgctcctcgcggccgtccccgacgaacaccccctcaccgccgtcgtgcacaccgccggcgtcctcgacgacggcaccatcacctccctgacggcggaacgcgtcgagcgcgtcttccgcccgaaggtcgacgccgcctggcacctgcacgagctcacccgcgagagcgacctcaccgagttcgtcctcttctcctccgcggcgggcgttctgggcacgccgggccagggcaactacgccgcggcgaacgtcttcctcgacgcgctggccgaacgccgtcgcgccgacgggctgcccgccacctccctggcctggggactgtggtccgacagcagcggcatgaccggccacctggacgacgtggacctgacccggatggctcgcctcgggatcaagcccatcacggcggaggaaggggtggcgttgttcgaggcggcccgtgccacgggcgccgcctgcctggtccccgccaagatcgccccagccctgctccgtccccacttggagaccggcactcttcccgccgtcctccagggcctggtgcgcgctcccgtccgcaaggccaccgtggccacggcgaccgacggcgccaccctccgcgatcgcctggcccacctgtcaccagaggaggccgaggacaccctcgccaccctcgtccgcacccacgtcgccctcgtcctgggccacgacacgtccgacaccatcagtctcgacaaggcgttcaaggacctcggtttcgactcgctgaccgcggtcgagctgcgcaaccgtctggcgtcctcgaccggactgagcctggcagccaccctcgtcttcagctacccgaccccacgtgaactggggcggcacctgcacgacctgctgcgtccggcagcggacaccggctcggccgaggacgcggggatccgggaagtgctgcggaccgtcccgatcgaaaggctgcggagcgcgggcatcttggagctggtcctggcgtgcgccgacccgtctcagccgaacgccgacggccaggcggcggacacggacaccggcgcggacgagctggcggacttggacctggacgcactcgtcgaccttgttctggatgagaagggtgagtgacatgaccaactccgcggatcgcacagcggacggcgcggaccgggtccaacgggcgctccgcacgctgctggaggagcgcgaccgcctccgccaggagaacgacgccctgaaagccgggcgcggcgagccgatcgccgtggtggccatggcctgccgctacccggggggcgtgtcatcgcccgaggagctgtggaatgtcgtccgcgacggcctggacgtagtgggcgagttcccgcaggaccgcgggtggcgggacatcttcgacccggatcccgacacgctcggcagctcgtacacgcggcacggagggttcctgacggacgcggccgccttcgacgcggggttcttcggcatcagtccgcgtgaggcgctggcggtcgatccgcagcagcgcttgctgcttgagacgtcatgggaggtcttcgagcgggcgggcatcgtgcccgccgatgtgcgcggggccgacgtcggggtcttctccggcgtgagctccgccgagtacgggacgcgtttcgtggaggcgagcgggcacgacctggagggctacctgctgcaaggcagcgtgctgagcatcgcctccggccgagtggcctacgaattcggcctgaccggaccggcggtgagcgtggacacggcgtgctcgtcttcgctggtggccgtgcacctggcgatgcagtcactgcgctcgggggagagctcgctcgcgctcgcgggtggggcggcggtgatggcgacgcccgcgctcttcgtggagttctcccggcagcgcggtctgtccgccgacggccggtgcaggtccttcgcggacgcggccgacgggaccggctgggccgagggcgtgggggtgctgctcctggagcggctgtccgacgcccgccgcaacggccacccggtgctggccgtcctgcgcggttccgcggtgaaccaggacggggccagcaacgggctgaccgctcccaacggccgtgcccaggagaaggtgatccgcaaggctctggcgaacgcgggggtctcggccgccgaggtggacctgctcgaagcccacggcaccggaaccacgctgggggatcccatcgaggcaggcgctctgctggcgacctacggacagggacgggccgagggcaggccgctccggttggggtcgctgaagtcgaacatcggtcactccatggccgccgccggggtcggcggggtgatcaaggccgtgatggccatgcgccaccggtacctgccgaagaccctgcacgtggatcagccctcacgccacgtggactggtcatccggtgcgctcgaactgctgctggaggggcgtgagtggacccgggcgggcggcccgcggcgggccgcggtgtcgtcgttcggcgtcagcggcaccaacgcacacgtcatcctggaagaggccccgcggcaggaacaggcggacgagggcgatccggactcgggcgtcgtcggcggcctcgtgccgtgggcgctgtccggcaagagcgcggcggccgtgcaacagcaggcgcgtaagctgcgcgaattcgccgtcgccgacccgggtctcgatgtcgccgatgtcggctggtcgttgacgtcgagccggacccggttcgggcaccgcgcggtggtcctgggacacgaccgggacgagctgttgagcggcctgacggcgctcgctgccggcgaggagtccgccgcggtggtgcgcggcacggcccgggagctcggcggtacggtcttcatgttcccgggacagggttcgcagtgggtcggtatgggccgtcagttgtacgacaccttccccgtcttcgcgcagagcctcgacgcgtgcgcggccgccttggccgagtgggtcgactggtcgctgctcgacgtggtgcgcggcgtggagggggcaccgacgctggaccgggtggacgtggtgcagccggcgttgttctccgtgatggtgtccatggccgccctgtggcggtcctggggtgtggaaccggccgcggtcgtggggcacagccagggcgagatagccgcagcccacgtctgcggcgccctgtcactgcgcgacgccgccaaagtcgtggcgctccgcagcaaggctctggtggatctgatcggtcacggcgggatggcgtcggtcgcggagtccgcggatgtcgtggcggaacgtctcgctccgtggagcgaccgagtgagcatcgccgtcgtcaacggaccccgctcggtggtggtgtccggggaacccgacgccctcgacgaattcgtcgagaagatgaaggccgaaggcgctcaggcccggcgaataaaggtcgactacgcgtcccattcacatcacgtggcccgggtccgtgaccaggtgctcggcccgctgtccgacatgagcccgaagacgtcgacgctgcccttctactcgaccctgtacggcgaggtcatcgacaccgcgcagctgaacggcgactactggtataccaacctgcgcgagaaagtcgtcttcgaaacgtccgtccgacggctggccgacgacggtttccgggtgttcatcgagatgagtccgcaccccgtgctgaccgtcccggtgcaggagatcgtcgaggacgtggacgacgcggtggtcctgtcgtcgtcgcggcgggatcgcggggaggtggaggccgtgctcggctcgctggccgggctccacgtccagggcgggtccgtggactgggacgttctgttcgggacgcgtcgacgggtggatcttccgacgtacgcgttccagcggcagcgctactggctgaactccgtgcacacgggggtgacggcggaggtgtccgcgctggagccgcccgcggctgacgacgatcccgtcgccctgccggacctgatcgccgacctctccgacgacgaggcgacggcacttgtccttgaccacgtcctcacgaaggtcgccgtcgtgctcggacacccctccagcgaggccgtcgaccccgaccaggaattcaaggacatcggattcgactcgctgctctcggtgcagctgagcaagggcctggccacgacgaccggactcaagctgaggccgaacctggtgctgcggcacccgacaccgaggcgggtcgccgggtacctcaagacctcgatggccggtcgcgaccggcggtgaacccacggtgtacggggcgcctgggccccgcacaccgcccagccgacggaccgcgagtccgccggcgaccaggctcgttccggctttcctgagaggatgatctctgtgcgttcgttcggtgcgtcgtctgcgcacaaagggttgtggcgggcgcaggaaatgttccccgacacactgaaccatgcgctcaccctgtggaacgtggacggtgagctggacgcggccgtcatggaatccgcgttcctgcatgtgatgggcgaggcggaagtgctgcgcgtcaccttcgtcgacgacggcgacgggctgcgcctcgtgcccagggaactgggcgactggcggccgttcttcctggacaccggcgccgaggacgatccggagcaggcggcgcgcgaagcgctggccgacatggtgcggcagccgttcgacctggagcgggacctgctgttccggctgggcgtggtcagactcgcggcggcccgctccgtgctggtgatcatctaccaccacctcatatcggacgggttcggcgcggccggcctgctgtcgcggcgcctggccgaggtgtacacggcgctgtcgcggggtgcggacgtaccggagctgccgcacccgtgggatgccgagtcgttcgcgaccgaggcggcgcagtacagcgcctccgagcagttcgccgaggacacggagttctggcgcgactacctggcggacgcgcccgcccccgcccggattccgcgtgtcgccctgtccgacgcgatgcggtccgcgctctccgaaccgatgggcagcgccgaccgctggggggagttgaccgagcccatcggcatggtgagccgcacgctgaccgttccgcacgccgatgcgcaggcgtggaccgaggccgcgaagtccatgggcgtgtggatgtcgtcgatgctgaccgcggccgcggccgtgttcctccggcaccgctgcgaccgtccggagttcctcctctcgctggccgtggccaatcgggtcggggcggcgagcaggacgcccggtctggcggtgaacgtggtgccggtgcgggtgaaggttccgctcggtgcgaccttcaccgagatcgccgacgcgatcggcgacgagacgtacgagatcttcgatcacgcggcctgccactactcggaaatccagcgcgcgagcggaaccgtcctcaacgatcgcggcagtttcggcgccgtcgtcaacgtcgtcgagttcgcggaacgcctccgcttcgccgacagcccggcgcacttcctcggcgggacgaccgggaccttcgaagaactcgcgatcggcgtctacaccgacggaaccgccgacagcgacctgttcatccggctcgacgcccccgcgagcctgtactcccgcgcggagctccgtttcatcggcgaggacctgatcgcgcacatccgcgccgtggtggccgccgacgaacaaccggtcggcgcgctggacgtggtgagcggtgccgagcgggaccgggtgctcacggcgccgaacgacacgaatgtgccggtgccggggctgagggttccggagctgttcgcccgccaggtggaccgggctcccgacgccgtcgcggtggtgtccggggactcggcggtctcgtaccgggaactggacgagcgctccagccgcctggccggggcactgcgacagcggcaggtcggacccgagacggtcgtggcggtggcgctgccccgatcggtcgacctggtcgtcgctctgctgggtgtggtgaaggcgggcggagcctacctgccggtcgacccgacgttcccggcggcgcggatcgcgccggtggcccgcgacgcctcggtgcgcgcgttgctcaccgatatggcgacagccgaagcgctctccggcgatctggatgtgccggcgatcctgttcgacgacatccgcccggacaccgccgccgacagcgacgctgcgacggaggttccgctcccgtcgcgtcaggacggcctgctggccgtgatgtacggctccggaccgaccggtgcggccacaggagtcgccgtgacgcaccggaacatggagcggttcgccctggaccgccgctggcgggaaggcggccgagacaccgtgctgtggcatgcgccgcacacctccgacgcgcttcccctcgaagtgtgggtgcctttgctgaacggcggccgcgtggtcgtggcccctccgggggagctggacatcgacgcgctgaccgaggtgcgagcggcgcacgagatctccacggtgtggctgcccgcgggcctgttctcggcgatcgcggcagaacgccccgagcgtctggccgggttgcgcgaggtgtggaccggtggtgagcgtgtgtccgcggccgcggtgcgacgggtgcgggaggcctgccccgagctgacggtcgtcaccggccacggcccgacggaaacaaccgtgttcgccgcgtcccaccgcatggccgcggacgaaccggtgcaccacgcgggcgcggtcggccgcccgatggaccacacggccctctacgtgctggggccggggctggcgccggtccccgtgggcgtggccggagagctgtacgtggccgggcccggcgtgacgcgtggctgccccgggcgacccgggccgaccgcggagcggttcgtaccctgcccgttcggtccggccggcgcgcgcatgtaccggaccggagaccgggtgcggtggagtaccgacggcctcctcgagtacgtgggccgggccggcgcccgggccgacgtacgtggtacccgggtcgaactggccgaggtcgaggaagcgctgtccgaacacaccagccttgcacggtcggtggtggtcgtcagcgaggacacctccgggcagcagcgccttgtggcctatgtggttccggtgggcggccggaccgttgcgggtgacgaactgcgccggttcgccgcggggcggctgccggagttcatggtcccgtcggtgttcgtggtgatggaacgcctgccgctgaccgccggcggaagggtggaccggtattcgctgccggagcccacgttcgatgacgacaagtaccgggcaccgcgcgaccacaccgagcgggtgctggccgaggcgttcgccgacgtgctcgagctggaccgggtggggatcgacgacgacttcttcgaccacggcggcaactcgctgcgggcgatcagactgaccggcctgatccgggcggagctgaaccaagaggtgcccatccgcacgttgttcgcggcgcgcaccatcgccgggctgtccgactcgtggaaggagctcgcccggtccagcaggccgactctgcgcaggaggacgaaggaaggcgaagctctgtaggtgttccgccgtcatcttcggcagaggcgagatccataccgccagacaccccggtcgacctggccgaccggggtgtcgctccgctgcggcccaccctccgcgcacacgaacacaccgagccgggcccctggccggctccgcgacccccgcccgggcggcaaggtgtcggccccggagagggaacctagcggactgccttccgggcggcggagaggtctcggacggtggcggagatgatgtcgttgacctcctgaccgtgctcgtcgaggtagaagtggccgccctggaagacgtgcagggagaactcgcccgtggtgtgctcccgccaggcatcggcctcggcggtcgtggtgtgcggatcgtcggtgccgaccagcatggtgacggggcagtcgagccgcacaccgatgacccgggggtgggtctcgatggccgtgtaatcgccacggacggcgaagacgatggacgccctcagatgcttgttctccaggtagacggggtcggtgccgccgacggaacgcagttcgtcgatgatgccgtcgtcgtcacggcggtgaaccgttccaccgcgcagcagggagggcggggggtagccggaggcgagcagccaggcgggcggagcgccggtgtcgtcctggtagcggcgggccacctcgaaggcgaggacggagcccatgctgtggccgaagaagacggtgggccggccgtcctcggagcgacgaagtgccgcgtaggtgaggtcggcgagttcggcgaagttctcgacgcagccctcggcacgccggtcctgccgacccgggtactgaacggcgagcacgtccaattccggtgagagagcttccgacagtgcgtagaagtagctcgcagaacccccggcgtgcgggaagcagacgattctgaattcgctgtcgtcggcgggatggaagcggtgtatccactccccgtcgaatttccctgaccctgtcatgcacgacctttctgtgtgtttaccgaatacggcccgcggtgcgggagcggtccgagcgtagcggagctgttcggaaaggaaccggcaacccgaacaacctcttctccatggggagcacaccgggttgtccggggcggaactcgatgagcgcatcgaattccggcgggccccggtgggttcaggcgggccggtggtccaggagggatgccacgaggctggtgtcgacgttgccgcccgagaccagtacgccgatgtcccgcgcctggccgtcggcggccaggcgcagggcgccggccacggcggtggcggcggcgggctcgatgagcagacgggcgtgcacgaggaccaggcgcagcgcctgggcgatggcgctctcctcgatggtgaagaccccggcgacggtgtcgtgggccaggtcgtaggggagttggccgatgcggtcggggcgcagtccgtcggcgatggtgggccgggcgtccacggtgaccggccccccggcctgcagggccgcggtcagggcggggacggcgctgggctcggcgccgtagacgtcgatgtcctggcccgtggtggccaggcaggcgccggccagcgcgctgccgccgcccacgggcagcaccaccgcgtccaggcggccgtcagcggcgtccacctggtgcagcaggtccacggtggcggtggcctggccggccaccacgtccgggttctggtaggggtcgatctcgtccaggccgcgggtgtgtttcagttcctcgaccaccgcgatgcgctcggccagggtggttcccacctggatcacctcggcgccggtgtcccggatgcgcgtcaccttggccggtgcggcgtcggtgggcagcaccagtacggccgcaagcccgtactgggcggcggccagcgccacggctatggcgtggttgccggtggactgcgcgaccacaccagggcttttggcccccgccagccgctccacggcaaggagcgcgccacgcatcttgaaagagccgccacgctggaggttctccgccttcagccacagccgggccccggccagaccctccagctcctcgctgcgcaccacgggtgtgtgcactacacggccggcgatacggcgccgggcatcgtgcaccccgtcatgactcagcagcggcggctgcccggcgaaagtcacggcattcgcgccgaccgacatgaatacgtctccgcttctctgcgacatcgaggcgtcctcgggatgcaagccgcgcgccgaaaagagcaaaccaacagcatgtgcacgcggcggagcttccattcatgtcctgtcgacgggacacgaatgcacggcccgcgcggatgcgctgatacagcggtgcgcgtcggctgagggggattattcaaacagttcatcgtgccgttccactttggcggcgcctccgatggaaatgcaagcccgcccgggcgtacggacttcccggagcggaaaagctcccctttgttcgagggcctcaagcagcttgatgcgatcgcactgatgaccccagccggaactctggaacggcgaaggccccctcgtcggtgagggggccttcgtgtggggagcgcccggcaggccttgcacctgcattccccatcggatgatgggcgtctttccttggaccacggacgcttgactcccgtgccgtgcaccggagttgggtgaagagcgtacacggtgtcggacacggtcgaagcggggcggcgtacgccaacgccgtgtcggagtacgccgccctcggtcgggacgagctgggggaggtggtcggccaggtcgtcccggctacttcgggtcgcggttgtataccgactgtgcccagacgtagccgagcgcggagaggcccaggcaccaggcgatcgagagccacccgttgtggccgatctcggtgccgagcagcaggccgcgcacggtctcgatgaccggcgtgaacggctggtactcggcgatcggctggaaccagcccggcatcgagtcgatcggcacgaacatgctggagatgagcgggaggaaggccagcggcatggcgttgttgctggccgcctcgacgctcggactgaccaggcccattccgaccgcgatccaggtgagcgccacggtgaacagcgtgagcagggcgaatgccgcgagccactccaggggcgtggcgtccttggaccggaagccgatggccacggcgatggcgccgacgaagaccacgctgatgatcgcctgcagcgcgctgccgatgacgtgcccgatgagcacggagccgcggtggatcgccatcgtgcggaagcgggcgatgatgccctcggtcatgtcgttggagacggacaccgcggtgccgaccatggtgttgccgatggtcatcagcaacaggcccggcacgatgtaggcgatgtacgcggagcggtccgcgtgtccgccgccgatgcccgcgctcatcacgtcgccgaagatgtagacgaagagcagcaacagcaggatcggcgtgaacatcaggttcagggtgagggacgggtagcgccgcgcgtgcaggaggttgcggcgcagcatcgtggacgagtcgcgcacggcgagggagatcccggtcgggcgggcgggagccaggggagcgttcatcggacagcctcctcggccttgtcggcgccgccggtcagggcgaagaacacgtcgtcgaggtcgggggtgtgcacggtcagctcatccgcctcgatgtcggcggagtccagccagtcgaggatggagcgcagctcgcgctggccgccgtcactgggaatctgcaacgacagcgcttcgtcgtcccgggtggcctcgcgcagcgcgagggcggcgctctgatagacggacgggtcggagaagcggagccggacatgtccgccggggatcagccgtttcagctcctcggcggtgccctcggccgcgatctggccgttgttgagcacggcgatgcggtcggcgagctggtcggcctcttccaggtactgggtggtgaggaagatggtgatgccgtcggacagcagctcgcggatgatgcgccacatgttgtgtcgtgagcgggggtcgaggccggtgctgggctcgtcgaggaagatgatgcggggattgccgaccagggtcatggcgatgtcgaggcggcgcttcatgccgccggagtaggtggaggcgggctttttcgcggcctcgaccaggtcgaagcgctcgaggagctcggcggctgcccgccgtccctcgcttcgtggcaggtggtgcaggtccgccatgaggagcatgttctcttcgccggtgatcagcccgtcgacggcggagaactggccggtgacaccgatcgcggcgcgcaccccctccggtgacgtggcgacgtcgtggcccgcgacctgagcctgcccgccgtcggcgctgatgagcgtggacaggatctgcacggtggtggtcttgccggcgccgttgggcccgagcagcgcgaagaccgagccggccgggatgtgcagatcgatgccgtcgaggacggtcttgtcgccgtacgacttgcgcagaccggtggcggagatggcggccgacgacgtgtgaccgtcggccagcccagacgtgggcatgacaaaagaaggcatggtgccctccgttcgaaggctgaagtgggtgaggggcggggccggttgacggtgtggcgctcaggccgcggcgcggaggatgtcgatgttgccgtgctgggtgcgggcaatgacctcgaccgtgtcctcggtcttcttcggcgcctcggacacggtgagggcgttgcgcacctggccgaagcccgagctgacgtcgagccaggcggccgtgccctcacggacgccgacctcgatgccgccgtaggaggtctccagctgaacggtaccgctggccacttcaccgaggcgcacggcgccgttggtggtggtggcggtgaccgaggcctcggcccgccggatcacgatgtcgccgtggacgctgctcgcccgcagctcaccgatcgcggcgtcgacggtcgtggcgccgtgcgagttcttcaggacggcggggccgtcgacgaggccgacgcgcaggctgccggtgctggtggtgatctcggccctgccctcgacccggtccacgctgatcgaaccgttcggcgtggtcgcatggagcggcccggtggtgccgaggcggacctcaccggccgacgtcctcacccggacctcgccgaactggccctcggcgagcacctgggcggcgccaccggtcatgtcgatccgtgagcccgtgggcagctcgatcatcacgtcgatgatgccggtgcggccgaacagactggccttgggcgtcttcacggtcagcacaccgttcgcgtacgtgacctcggtctgcttggccgtccgcaggtcctggtccttcccgggctcgtggggccgcacctcgacgacggtgtcgaggcggtcgcccgcggtgaactggatggaaccggcttccacgtgcaccgtggcagagatcggttcgggggtgtcgaaagaaggcatggctgtcccgtcctcttgggtctccgggccgtccctgctggtgggacgtggtatgggtgaagtggtgcaggcaggggcgcggttagcgcacccagcccgtcatgttctgtccgacggtctgggtcttccccgtcgtacgcggccgggcgccggcgttgaccgcggccgacacggtgcgcaccagccacgcgttgaccgacagaccctcgcggttcgcggcctgttcggcgcgggccttgaggtgagccggcagacgcaggttgacgcgggcggtgccgccctcgtcgccgtcggcgggggctgggagcggttcgacgggtgcggtcggctccgcgggggtgccgctgtcggcgggcggcagcgtcagcacgaactcggggtcgagcccgcgcagccgaatgtcgaccgaacccggggcgagttcgcgggtgatctcgtccatcgcggcggagagcacgttgagcatggccaggtgggtcgccgactccagaggagcgacgagccgctcggccagctcgcgggcgtcttccccgctggcttcagcggccaccaccagttcgcggcggagggtgtcgatatgcggggtgaggtccatgacgtcatgatggcagcactgtggtgccatgcgcaagcccgcgtggcaccttaggcgagaagtgcctcaatgcaaccgctctaccagcggaaacgtgaagggatcgcccgggtcatggtggtgccacacgggtgaaaggtcggctggggagcgcggcatggcgcctgagtgacatggagtgatgccgtatgacgccaagcggtgtcgctccgcggtgcgcatggccgtggtcacggatcgacgtcggcgaaactgccgccttcgtccgctgcggcggaaacgggccgcagacggtgctgctgcacggcgcgcgatcccgacatggtgcgggccatgcgggagggctaccgcgccgaactcacgaccgaccggcggcgcgagcgggccgaccgcgacgccgtcgggcgcatcgttcgcccgacgccgatgctcttctcgctccgggatgacctggaggacccttacggcgaccccgtcgcgatccggcgccggtgggccaccgaagtgcgcgggcacggcaccggaactcatcggcatcgaccggcacgccgtcgcaccgcccggcggagccatcgtccacgccggcgaacccaccgggctgctccatgagtgcggccaggtcctcgttcaaccgccctcggcgtcctcctccttgcccgacggcatggcgagcaccgccgagaagttcgcccgcaccctcacgggcctcggcgacacgggcggcaccgatccgcgctgccttgcgacccacgacatcaagatcttcggcgacggcgccgtcctgcaagacggcctggatgcacggcggctgcggctccctgtgcgtgaacggtgccaccgacaccgagcgcaccgccgagaccgacgccgtggtccggcacgcccgcgccgccgggcaccagccagacgtccacgtcaccggcgaccgggcctgccacaccgccgcggaggccttcgcggcggccccgggcacccgcgccccgatgccgcaccacgtcatcctcggcgacttcctgaccgcgcacagcctggaggtgccggccgtgcacggcttcggtgccgacatgaaccccctggtcgcgacaagcgtccgcggctcggcgatcgtcgcgtcgtcgaggtcggccgatcgtatggaggccggctgtccggcgcatcgtcaggccggacggacaggccacctcgcagccctggcgacgggcgaagccagtggcagggcgccgatggaggcggcctggccgacacctacgagggcggcgccgtttccgggccgcagctcggcgaagacctcgcggaatgtgcgctcgctgtcgggcagccgcttgtcgaagctctgcttcccggccgacatcgaccggattcatcggaccgtcatgaaccgcacgggcattgactttagtgtcgctccgttattcctttctcaccgggaaccgctccggaatcggttccggaatgctcgatgtcttccatcagaggggaataaaggtgtcgcacacacagtcggaacggacggcgcacgaagaacgaaaggcatcgccccggcgttacctgatgtgccgtcccatgtacttcgacgtcacctactcgatcaatccgtggatggacccggatcgccccacctcgacacagaccggactggcccagtggaaagggctgttcgacaccttcgtcgacctgggccatgacgtacagctgatcgagcccgtaccgggacttcccgacatggtcttcgccgcgaacggcgcgatcgtcgtggacggcaaggtgctcgtcgcacgcttccggcacccccagcgcagggacgagtccgcggcatacgaggagtggttccgcctcaacggctggtccacggtccagcaggcggagtacgtcaacgagggcgagggcgacttcctcttcacgggcgaggagttcctggccggcaccggcttccgctccgaatcgcgggcccacgacgaggtgcgcgagttcttcgggcgccccgtgaccagcctgaccctcgtcgatccgcggttctaccacctcgacacggcactggcggtgctcggggacggggagatcatgtacaaccccgtggcgttctccccgcagagccgggcagtgctggccgagcggttcccggacgcgatcctcgccgaggacgccgacgccgccgtgttcggcctcaacgcgctgtcggacggccgcaacgtcgtcctgccccggaaggccgccggcctcgcggcgcagttgcgcgagcgcggctaccaccccatcggcgccgacctgaccgagctgcttaaggccggaggcagcgtcaagtgctgcacgctcgaactccgcgaatgaggcgcgaagccatgtgagggcagcgtggaccgcgggctgtcccgtcgacgggacagccgcaccggaacgcgcgagagaaacgatgaccattcacaccgcatctcaactcggaccatcaaagcgggggttcggtagttccatgccggggtgaggaacaacggaaccgtaatttgtggtagcactaattccacgtgatcgacccggccttcgagggggatgattcggccagggcggcgcggcatgcacaagccgtcggacggcaaggggctgaacttgggtgtgcattcgtatcccaccgacgggacgcgaatgcacggcccgcacggatgtgctggcacatcggcgtgtatcggctggtccggcgtacttgaattggttcatcgtgccggtctacgttggcggcgcggccgatggaaattcaatcccgcccggacgtggatccttctgggagcggacgattaccggtcgaagatgtgaacagcacatcgcacagtcatgcctgcgggagagaatcttctatgagtgatcgtgaacacgagacctatgacgtggtcggcattgggttcggtccgtccaacctgtcactcgccatagccctggaagagtaccgggcgaatggtccggagaatgagatcagtgccctctttctggagcgtcaatccgcgttcggctggcaccgcaacatgctgttgccgtcgacgaccatgcagatatccttcctcaaggatctggtcactttccgcaatccgacgtcgagtttcagcttcatcgcgtacttgcacgcgtcggggcggctcccgcagttcgtcaacaaccaggatttcttccccacgcgccaggagttccaccagtacctcgagtgggcgcaggcacgggtggccgatcgcgtcgcgtacggctcggaagtgacgtcgatccggctgccgccgggtgccgatccggagcggtcggaccggctgcgcctcgaggtggcggatgccaccggccgcaacggccgcgtggtcgaggcacggaacgtggtgatctcgaccggcctggtcccgagcatgcccgtgggaaccgagcgcgacgaacgggtgtggcacagttcggagttcctggagaagtaccgccggatgaaccccgcggaactgcgtcgggtggcggtggtcggggcgggccagagcgccgccgagatcaccaggttcctgtacgacgagcttccgcacgccgaggtgtgcgcggtcatcccgtcctacggctactccgtcgcggacgacacccccttcgccaatcagatcttcgaccccggggccgtcgacgactactacttcggcaccgagcagacgcgggaggcgttctggcggtaccaccgcaacacgaactactcggtcgtcgacgacgaggtgattcgggatctgtaccgcaggtcgtacgacgacgaggtacggggtgtgcggcgccttcagttcctcaacctgacgagggtcaccagtgtcaagcgcgtcggcgccgagacccgcgtctccctgcaggtgggccccgacgacgaggtgcgcgaactcgacttcgacgcactcgtctgcgcgaccggctacagcacgatggagcccacggacctgctcggcgatctcgaccggcactgcctgcgcgacgaggcgggccgataccgggtggagcgggactaccgcatcgtcaccgcccccgagatgcgctgcggcatctatctccaaggtggtaccgagcacacccacggactgacctcctcgctgctgtcgaacatcgctgtacgaagcggtgagatcgccgactcgatcgtcgccggccgtgcgggacggaacgccgagcgggcactcctcgccgaggtcggcggcgacacccgctgaaggcccgcaaaagaaagaacgggaccgggcgccacacccgcgacacccggtcccgcatgtctatgtctcctgcgagggacggatcggatccccgaggaatatccggcatcccggaggcgcggcttcgggagattcggtgatcgtgacggattccccggtgggccgggattcccaggtatttccttgtgtcaccgatcgtgccgatcactacatgtttccggcggacggaaagggggcttccggatgaggagtccggtggaagagcggtgggtacgccgcttccgtgacgacgacgggtgcgcgacgaagctcgtctgtttcccccatgccggcggctgggcgaacgcgtaccgtacgtggcatctgggactgccgtcggacatcggcgtactcgctgtccggtacccgggccgggaggaccggctcagcgatccgttcccgtccgggctggaagccctcgcggacgacatagccgacgcactcggcgagctgacgcggcatcggctggtgctgttcggccacagcatgggagcttcggtggcacatgaggtggcgctgcgcttgcagaaacggggatgtccgccggctgccttgtgcgtgtccggcagacgcccgccccatgcgctggacggccagcggcggttgtccggcacggacgaggagatcgtcgcggacgtcgtgcgcttcgacgagagcagggccccggtcttcgcggaccctgacctacgggagatcctgctcccggcggttcgcgcggactaccggttggtggacgactaccgcggtggccgccgacctctgctcgactgcccggtgtacggttacgccggtgacgacgattccgaggtgaccccgaagcagatgcgcgactgggcggacacgacgcacgacgccttccgtctccgggtgctgcccggtgggcatttctacctcagagcccaggaagccgcgctgctggcggacatgagaaacgtactgggtcgcatcaagtcccgtacgagcgcctcctcatgaggactgcgcgccctggatcgtaagaactcaccttgcggcgtacgggactccgtcgcgggccagatcctcatcgagaaggctgccgccgtacatccaacggtccgagagaccccggtcggcggtggctaccgcacccagccgttgaactgctgcttgccgcgaggggttcgcttgctgttggtcagcgccgcggcggaggctcggaccatccaggcgttgaccgagatgccctgtctggacgccgcctcctcgatctgatccttcatcgcctgcgggggtcggaagttgatccgagccgtcgtgccgctcatggcgccactgagcgctccggccgaccagtcgctcgccgcgtcaccggtctcatccgtggtgtcctcggtggggccgtcgtcgcccgagggcggagtcaccacaaaactgggctccatcccgcgcaggcgcaggtccaccgagccgggtgccagctcctgggtgatctcgtcggccgcggccgacagaaccttgagcaacgtgagccggacggccgactccagcggagcgacgaggcgctcggcaaccgcgcgggtctcggcgtctgctgccgcagaggttgtgaccagttcgtcgcgcagcgcatcgacgtactcccgtagttccatggagacatcatggcacactgattgcgccggtcggcgcctgcttggcccattcccgcgcgaccccctttggccaggtgaaacgtgtgatgcctcgacgagtcggctgccactcttggacttggcggctcgacgtggggccataagggcgccaggtcatatgccgcacgcggagtgcagccacgtgagtgccaccgcagcgcgcggatcaaccgcggtcacgcgagagcgggccgaggagaaggcggtcgtattcggccacggccatcacgctgttctcccgccacctcgctgagccaggtgtggcgggagagcttcagggggcggtgtggcaggcgcgtgatgccgtacggggcatgccacggacccttgcgtgctacgtggctgcctcgtacgccggcaccacgtgcaaaggggcaggccccggagagcgggggattttcctctccggggcccgcgagggcggcaccgatgaaccgacggggggacggtgtcggtgccgtgatcgtgaccagcgatcagctggtggtgccgtcggccgccgcgtcggatgtcctcgtccctgaccctcggggcggggcgatgacgaaggccggtttcggaacatcggtcgctcggcgagagagccacttcgttctccgcctcagcggcgaccgggatcttgcgccacagattgtcacgtactgcgaccgatccgtggcgccagtatggcatcgctttggcccccttgcaagtctcgcgtcctttgggtcgcagttgaagaaggaggccctgccgctggcaagtccccctgagcggcagcgaggtgccgctggcgccacgggtggggggatgtggcgccacgtcgccctcggtgacattccacgtgcaggcgcggagcccggctgcgatcggactcattccgcgcaggaacgctccaccacgacgtcgccgatcacggtccgggcctggacgcgcacgaactcgtcggcctgctcccacgctgccaggagcgcgagagacgtgtagacggtgcctgcggcggagtcgagggacaggcgggcgctggtggtctcggccacgccgatccggatgttgccgaacgtggtgacggcgacgacggttccccgcgccacctctccgatgtcgatgccgccctgggtcgtccgggcctccacgtcggtgtgcgcccggctgatcctgatggcccccttctcggtgtgcatgcgggcgactccgcgcacctttcccacagtggcgtcgccatcgcccatcgctctgatcgtggcccagccctcgacctgcctcaggtggacgttgccccggttcgccgtggcctcgacgctgccggccgcacggccgaccgtgatgtcacccagggaggaggtcagttgcaggctgccggtacggtcgagcccgatgcgccccaggcccgtgctgagttggcactcgcccagctctcccaccgcgaggaagtccgcggccatgccccgcccgtgcaggctcgatcctgtcggcacggctatcaccacgatgaccgcgcccccgctgccgccgggctccgggacgttcacgagcagccagccgtcggcgtattcgatacgcagctgctcggcggcttgcacgtcgtcctggtcgtcgctgtcgcgcggatacgcctccaccgtcgtctcggcgcggtcactcgcggcgatgcggacctggccgaacatcaggttgagcaccacgcggacaggcgcgggtgtgtcgaacgtcggcatggcgagccgccttcggaatgtctgaggccgccgatctggtgcagacggcagcccgaacgacgcaggtcgctctgtcacggggttggtctccggtctcggggtgcgagcgaccgggggtacgggcacgtaccgctgggggacgcggcgggttctggcccgccctcgccacgccggacacttcgccctccgccccgcgcgcgtcgcgtcccgtgcctgcctgccctttgtcgcccaccgtccgggctctccggccggggcctttcgaccctgcccggaagagaactggtgggggcacctttcggttcggagcgtaattctctgctgacatcatgtggtgccacattagtgtcataacggggtgtccgggcggggtgcgcctcggaactccatgtgacggcgagcggaatcggtcacagacgtacgggcgtgccccccgggattcgagtcgggtcatccagccgtcaccgaagtccggaagcgtgggaacgctccctcaccgatgtcgccgatgtcgccgacgctctgacggactgccggatgaagaagcgggccccggtggtgccatctccgcaccggctctgcgacaggcggcacggatcgccttgcgtctcggccggcctcgcagggaggtgccgacatattccagccaatgtaaggctgtggccgactgctgtgccgcctgcccctctggggcgttccgcaggtcacggtcgcgacgtcaacagagagccggacgcccgtatcccgctgtgacatgctgcgcgccaagatggcgtcgattgacagtagacatggcgccacatgatgtcatcatggcgctatgacagctctgcgatcgctctgcttcccgggagagttccgcgccggcacttaccggcgcttcacggcggcccccgacgccccctcgccccgggtgtccggagcgcggatgccgctcggcaacgggcggcgcaccgagcggggcgcgccgtgaaccaggcggcgaccaccgcggggccgcaccggccgctccccggaccgcacggcccctcggccatccaggtccggggactgcggaagtcgtacggaacggagaccgccgtcgacgacctccatctggatgtcccccacggcaccgccttcggcctgctggggcccgacggcgccggcaagaccaccgtgatgcgcatcctctcggcgcgcgtcgccgccgacgccggcgagatacgcatcgccgggtacgacctccccacagacgccgacgccgtacgcgcggccgtcgaactcgtcggccggacttcggcggtggacccccgcctcaccgccgagaagaacctgctgcggacatcggccctgtgccgactgccgccccgcgagggcgggtcgcgggcagccgaactccttgcgcggctcgatttgtcacgggtcgccaccgagcctgcggctgccttgtccagcggccggcggcgtcggctcgatctggcgatggtgctggccggggatccgggcgtcgtcctgatggacgagcccaccgcgggtctcgaccccgtgagccgccgcatcgtgcgggaggtggtgcgcgatctcgtcgccgacggcatcacggtgctgttcaccacctgctcgcctcaggaggcgggccggctcgccgaccggatcggggtcctgcgccgcggtcggctcgtcgccgagggcacgcaggacgcactgctacggctggtcccgggcggtcacatccgtctgtacttcgccgacacggccgaactcgccaccgccgccgcgctgttccacctggacacggtcgtccgggacgacaccgcgctcagcctgcggatcccgggcgacggcagcgtcggcctgatccgcgccgtcctcgccattctggaggagggccgcgtggagcctcggcggttggcggtgcacagtcccggactggaggacgttttcaccgcgctcgtgcacaacggcccccagggtccgccacccacccaccgcgccgtgcactcgccggacgccccactcggggaggaagcgcgtgacatccggtggctgtggcgcgaggtcctgcccgtcatggccgcgttgctgctgctctgcgcgcatgtcgcggaggccgggcccgccgtcctgcccggcgtgcttccggccgccctggtgtgcgtggcactcgcgctcgccgggcgccgcagacgtgccgccccccgttcgccgaagcaccgcggccctcacgcgtagcccctgaccgcgtcggcgccgaccgttgcgtcccaagtcctttcgacacacctcgtcttcgctacgtactaacgggagttggatcacattggctaccttgctctacaggatcggccgcttcgccttccggcgacgaggtctcaccgtcctgctgtggctcctggtcctcgtcggggccggagtcgccgcttcatccgcgccgccccctcccaccgacaccttttccatgccgggcacacagtcccagaaggccgtcgacctgctgaaggagaagttcccggccgcaagcgccgacggtgcctcggcccgagtcgtggtccgcgcaccgtcgaaccagaagatctcgaaccccaagccgaagaagaatgtggcggctctcgtcgaggacctgtcgaaggccccgcaggtcgtcgcggcctccgatccgttcaccacgggcgccgtcagtaaggacggcacgacggcctacacgatcgtcacgtacaaggtcgccgccctgaaggtgtccgacaaggcgcatgacgccctgagcaaagcggccgccgacgcccgcgcgaacgggctcagggtcgagatgggcggtgacgcggtccccgtgaagcaggcggcgggcggctcctccgagagcgtcgggatcggcgtcgccgctctgatcctcctggtgaccttcggttcgctggtggcggcgggcatgccgctgctcaccgccgtcgtgggagtaggcgtcggcatctccgcgatcggcgccctcggcagcacgctcggcctgtcctcgaccaccacgaccctggccatgatgatcggcctggccgtggggatcgactacgccctgttcatcgtctcccgctaccgcgccgagatggccgaggggcgacagcgggaggaggccgccggccgggcggtcggcaccgcgggctccgccgtggtcttcgccggcctcacggtcgtcgtcgccctcgccgggctcgccgtcgtcaacgttccgatgctgacaaagatgggtctggccgcggcgggcaccgtcgcgatcgccgtcctggtcgccgtcacccttgtaccggcgctgctgggcttcgcgccgttcaaggtgttgcgccgcagggaccgcaagcggatcgcgggcaagccgctgtccgggcgtcagcgtcgcaaggcggcgaaacgggcggcccggcagcggccgaacctgggtgcccggtgggcgagcttcgtcatgcgccgtcccgtcatcgtcctgctgttcggggtcctcagcctcggcgccgtcgccgctcccgcgacccggctggaactcggcctgcccggcgagggcaccatggcccccgacaccacccagcgcaaggcgtacgacatgctgtcggagtccttcggccccggcttcaacggacccctgacggtcaccgtcgaggcccacgacgccaagaccgtgggcaaggacgtcgccgccaagctgtccgacgagcccggcgtcgccgaggtgggctccgtgaccccgaacaaggcgggcgacaccgcgatcgtcaacgtcgtaccggacaagggaccgacggacgacaagacgaaactactggtcaaaaacctgcgcggcgacctcgcccgggtcgggcgtgtccatggcgccgaaatcctggtgagcgggcagacggccatgttcatcgacttctccaagaccctcagcgacgcgttgctgccctatctcggtctcgtggtgggtctcgctttcctgttgctgatcctcgtcttcaggtcgttcctcgtgccgttgaaggccgctctcggattcctgctgtcggtgtccgcggcgctcggtgccgttgtggcgatcttccagtggggctggttcgccgacatcgtgggggtggaccagcctggcccgatcatgagcacgatgccgatcatcatgatcggcgtggtcttcggcctcgccatggactacgaggtgttcctggtgacccggatgcgcgaagcctatgtccacggggagtcgtcccggcaggcggtcgtcaccggcttccggcacggtggtcgcgtggtcagcgcggccgcgctcatcatgaccagcgtcttctccggattcatcacacaggacaacgtcttcgtacggatgatcggcctcggcctggccctggcggtcctcttcgacgctttcgtcgtccgcatggccatcgtcccggcgctcttcgccgtcctcggcgaccgcgcgtggtggcttcccaagtggctcgaccgcatgctgcccgacatggatgtcgaaggcgagaagctgtcgcgccggctcgcggccccgcgggacctgcgcgcggcgcgcgaccacgagtacagccgctgatgcgcgccgtgggggccggttcgatcccggaatcggtccccacggtcgagaggacgtcgcgccgcgtcgctacggcacccgctgtgccgtgttgcggcacggcacggcggtgagcccgtgcaggcgctggaaggcgtacgcggcggagacgagtgccatgtggtggtaccagccggggaacgagcgtccctcgaagtccagaagcccgaagtcctgctccatggaaccgatcgcgtccgtcgtcccgcggtgcagtgaggcgatcgaggcggcctccgcgagggggtggtgggcgaggctggtgagccacagcaggcccggtgagcgggcggggcccacttcggtgaagagccggtaaggaggtccgggggagcggccctgggagccgcccgccagatggacgagtgaggtctggaggtgtgtgatgcgctgctctccgccgggcaggtggacgagggccgtctccgggctctgtgcggagaccagggttcttgcgcgcgctggtaccggggcgccctcgcgggcgggcagcaccgccagatgcggtggcaccgcgacgacgaagtcgcggcggcgcttggcgagtccgtgcagcagatatcccacatcgggttcgtcgctcatgtcgacgagaacgaccgaggacgtggagtgcgtgcgggccgccagccggtccacgagtcggagcgtgtgtgcccactgcggccggtaccgctcgaagtccggtatacgtacgtccctgcgccgttcggggtcctgtgtccaggtcgtcggcaggtgcaggcaccagtcgacgggaacgtgagcggtgtccacgcacaggaaggatcccagtcccagctggcagttgagcgtacggcccgaggacaggtcgaaatagcggtggacacccaccgaccggtcaccacgcttgggcaggacggcccggccgatggaccacacgggctcgggtcgacggtccgccacccagtgggtgagttcctccatgacctcgtcgaaatcccatgggctgagactcacgaattggcgcagcgactgcacgacggacgggtcgcgggagaccacggtggcgagccggcgcaccgacttcttgcccgaggtgacgagcagccctttcaaataggcgtgtgcccacttacgttgatcggtccggcgtaagcctttgaagatcgtgctgctaaaccggttcagaggcaattctgaattgatggcgcacctagcgcctcgtgaagtcgacgaggtgtccgcttgggtggtattcatgccgcaataactcccccgatgttactgagcgttgtgatggcagagtctaggtcccgctccagtgtggcgccactgtaagaggttggtcgacctgttttggcgcctcgatggcgcacggcctcggggtcctggtggcaggatgacggctagattcagctcatcccttcatggggtgggccgctggccctcgttgtcggcgacagtgtgtggacttcgcgatcacggtgtgatgacctgcgggaatgtggcgcttgcgtactcgatcggggcggtggcgaggggtggaggtggcgcttgagggggccgtgatgcattgcggctcctgattcggagcgccgcaggccctgggggcgcacctagatcacgccaaagcagtggcctagaccactgaatcagaggagtgttcgaactctgcaaagtagtgctcgatggcgccaagatccttgaaccggcatcgatgtcgggatctactcgggagcacggcagttggccatcccgacctcaacgggtaaccgtgcaatggctggttcattcagcccggcagtactcatctgcgagcggtggccactgctcttggcatgcgtgccaaaaaacggggtgaacgctttcggcatccgatggggagccaccgcgaacccgcttggtcgatacgcgcatttacggggaggcgtgatgacgaatcaggtcgaggactgcaaagactccaaggcggtcatgttcggcagagccgcggaggctgtgccgaggaaccgaagagccggtggggtggattcgcggggtgatcaggtactcaccacgaaggtgggactgcacatacccattggactcgccttcgaggagtgggaacgcgccgggcgccagctctccgggctgctcaactcctcgtcctggtggctcggggactggctcgtctacggcaaggaccactatgcggaccgctatgagcgcggcatccgcgctgccgggctgcaataccagacgctgcgcaactacgcctgggtctcccggcgcttcgagctgcaccggcggcggcccgcgctcagctttcagcaccacgccgagctggcgtcgctgccgctcgacgagcaggaggtctggctcgaccgtgccgagcggatgaagtggagcaccaagcaactgcgcaacgccatccgggcccagcgcgagcccatcccgcagcagacggacgccgtggcgacgacgagccggctcgccgtgcccgacaaccggctgcagtggtggcacaaggcggcggcccatgcgggcaccgagttgggggagtgggtgacggccacgctcgacgcggccgcggaccaggtgctgaaggatgccgaccggcaacaggatgccgaccggcaactcaccctcgaatgaccggttcatgagaaccggcccgtaaggcggtcgcgtcggggacaggcgggggtgtccggccggggcggtgaaagtcacggggtccgcacacgtcaaggggtgcggaccccgtgtcatgggtggaaccgttacggcagacggttcatgagatccgccgtctgtacgtgccgggtgcattcgcgcccggcgaatgactgcaccacccgctcgcgaatctcgggacgctgttcctggctgagcttgaacattccctcggccttggtcacccggacacggaaagcgccgacgccggtcactatcttgcggaaatagtcgaccgattcgctcatgtcccagctgtcgccgaattccccctcgaaggcttgcacggtcgcctgtacgacatccagggtctcctccgtcgactcgatcttctccaccactccgtgcacatgcaccgaggtgaagttccatgtcggggcggcaggcgtgacgtcgtagacggtgggcgagacgtaggcgtgcggaccggtgaacgtcagcaggatcgccgacccggtttccagcgccgcccagtgcggattggcacggttcatgtgacccagcagaggcatgcccgccaggtccgcggtggggctgccctcccactgggggtcggtgatgaccgggaggtgggtggcgaaaggtccgtcagcgggagttccattgctggccatcagtgccagcgggttcccgcgcatcagatcgaccatccatgagacgtccggttcccggtagtggctggggacgaacatacagcactcacctttcgtggtgtgacgaaaacagtgcctgtccggcatcgaggccttgagacgcggcaatgatgcggcgaatggtcgacgacatcgccgtactgtcctgttggcaggacaacggggttctccatcgtggcccgttgtcgtctccggcgcaatgaagggacgaaccggcatcaacgaatcgtccggcgggaacggaaagaggaagcccggcggtatcgaatcagaacggcggtgagtttccatgccgcagcctgtacctggaaaaggaccccgtcagccctcaggaggaattcatggaaaacgggcaggcggtcctggcagcttctccggaggcggccgctcggccaccccggcgtccggtccggattctggtcaggagctcgaagcgacggcggcttgccgcacgccgcgggacttggtgtgatgcgggtgttcccgagaacatcgccgagcagggtgaacgcgcggccccgtgcggtgttcaactgctctgcctcggtgaacaacgagggcggccacaccgggcccgagccggaccgccccgacccatccggatccgacccccgcggcggatgggccggggcacccctcgacgttccgatctacgggcttcggacctgaggccttgaggaagacgcggatctggcgggcacggctggtctcatggagggatcgtcgcccacgtgtggtgcggggaacggggcggttcgtcgcccgcacctcccacgcgctcggatcaggccgggcggccgcgccgtaccgcctcgatgccggccgcaccgtcgtgtgcctcgtcgacgatctcgatgtccggggccgagccgagaatggtgcgcaggaacccgcacaccatgggctcgtcgtccaccaccactacccgggccacgctcacaccgccgattcggaggtcgggacgaacacgggcagcgtcgcctcgacgctgaacccgccgtcggaacagggtccggcacgcaacgtgccgtgcacgagctcgatgcgctgccgcagtcgggcgatcccgagacctgagccggtaccggccagggcgccgcgaggtccaccggtcggtggcgtgtcgcggaccgtcagccgcagctgtgccgtgtcgtactccacgcccacgttcacgcgggcgccgggagcgtgcttgcgtacgttggtcagcgcctcgcgcagcacgcggtaggcggtgcgcccgaccaccggtgaggccatcgccggatcgccttcctcgatcagctcggtcggtatccccaccgccacggactcggcgaccaggccggcgaagcccgccaccgagggcgtccggtcgccctccggcgcggtgcgcagaatgccgaccaggtcccgcagctcctccagcgcctggcagcccgcggagcgcagttcctcggccgcctgccgggtcgcctcgtcgggtgccgtcaccctcagggcaccggcctgcagcaccatcaggctcactcggtgggtgaccacgtcatgcatctcaccggcgagccgggcgcgttcttcggcgcgggcccgctccgccagcagatgacgctcccgttcggcgcgctcggcgcgctcgaccagtgcctgcatcagcctgcggcgggtgtcgaagtacagcgccggcagcggcccgatcgtccgttactacgggcgatccgcgctccagtactacgtgtccacggtcgcctccgtgtacttcatgggcctgctggcgcactgcgtgctggtgagcgtcgtcgaggtcctgctcatcacggcggtcggcaggctttacggcgtcccgttgcccgccgcctcgcggtggcccgtgctcgcggtgtccctggtgctcggcgccgccggtcgtgcaactggtgctgttcccgctcgtgttcatctcgggcacgtacgtgccgatccactccgccccgctgaacggcatcgccggtgcgctgccggtgaaaccgttcaacgacgccctgctccgcgccttcaccacgaaccacgccggcctcccctggcgggaccacggcgtcctgctgctgtggggggtggccggtgcggcggtggccgtccggcggttccgctgggatccgcgtgcgcagtgagcgacccggcccgggaccatgcccgccccgggcacgagggccggggcgggtgcgaggtgcctacagctccgtgcgtaccgtgcgggccgcggtgaccaggttctccagggaggctcgggtctccggccagtcacgggtcttcaggccgcagtcggggttgacccacagccgctcggcggggatcgccttcaggccggtgcgcagcaggtcggcagcctccgccgcgctgggcacgcgcggcgagtggatgtcgtagacgccgggtcccgcctcgcgcgggtagccgtgggcggcgagttcacgggccacctgcatgtgcgaacgggcggcctccaggctgatgacgtcggcgtcgagatcgtcgatggcctggacgatgtcgccgaactcggcgtagcacatatgggtgtggatctgggtgtccgggcggacgccgctggtggtcagccggaaggcccgcgtggcccactccaggtacgcggggcggtcggcggcacgcagggggagggtttcgcgcagggcgggctcgtcgacctggatcaccgaagtacctgccgcctccaggtcgttcacctcctcgcgcagggcgagggccacctggcgggcggtgtcggcgaggggctggtcgtcgcggacgaaggaccaggcgagcatggtgacgggaccggtgagcatgcccttgaccgggcggtcggtgagggactgggcgtacgtcgtccagcgcaccgtcatcggctcggggcgcgagatgtcgccggccaggatcggcggccggacgtaacgggtgccgtaggactggacccagccgtgctgcgtggcgaggtagccggtgagccgctcggcgaagtactggaccatgtcgttgcgttcggcctcgccgtgcaccaggacgtccaggcccgccttctcctggaaggcgatcacctcgcggatctccgccccgacgcgttcctcgtatccggcggtgtcgatgcggccggccctcaagtcggcgcgcgcggagcgcagttcgccggtctgcgggaaggagccgatggtcgtggtggggagcgcggggaggcgcaggtgggcgcgctgggccgcggcccgctcggggtatggccggcagcggcgcgcgtcgtcgtccgtgacggcggcggtgcgggcgcgcacggccgggtcatgggtgatgggcgagtgtgcgcgggaggccagatcggcccggttcgccgacagctgcgcggtgatcgtgtcggtgccgcgggccaggcccttggcgagggtgacgatctcggccgtcttctgccgggcgaaggcgagccagcgcaggatctgcggctcgatgtcccgctcggccgccgcgtcgagggggacgtgcaggagtgagcaggaggccgacacgtcgacccggtcggccaggccgagcagggtgccgagcgtggccagggaggccgacaggtcgttgccccagatgttgcggccgttcacgacaccggcgaccagccgcttgccgggcagtccgccgacggccgcgagcgcgtccaggttggcggcggccgcctcggtgaagtccagggccaggccctccaccggtgccttggccagcaccggcagggcatcgccgagccggtcgaagtaggaggcgaccagcagcttgggccggtcggtgagggcaccgagatcgcggtaggcgcgggcggcggcgttcagttcggccggggtacggtcctggaccagggccggctcgtcgagctgcacccactcggcaccggccgcgcgcaggtcggcgaggacctcggcgtacaccgggagcagacggtccaggagggtgagcggctcgaagtccgcggacaccccgggcgcgggcttggcgagcagcaggtaggtcaccgggccgaccagcacgggacgtgccgtcaactccagggcgagggcttccttcagctcggagacctgcttgccggagtcggccgcgaaccgcgtgtccgggcccaactcgggcacgagatagtggtagttggtgtcgaaccacttggtcatctccagtggcgcgacttcctgcgtgccgcgggccatggcgaagtagccttccagcgggtcggcggcgacggccgcccggtgccggtcggggatcgcgcccaccatgacggtggtgtccaggacgtggtcgtagtacgagaagtcaccggtcgggacctcgtcgacgccggcctccgccagctgccgccagttggtgcgacgcagttcggcggcggccgtgcgcagggcgtcggcggtgacccggcccttccagtggccctcgatcgccttcttcagctcccggccctggccctggcgggggtagccgtacacggtggcccgtgctgccgcggctgcggacttggtggtcacggagatctccttcgcgagatgaatccctgagatcccggggacgggacgagagcgcgaaggggtgacgtaccggacggcagcggccgtcggccgtccgttcggtcacgcacgccgacccgccctcgaggtcaccgggattccgcgcacgagtcgtcccgtacgcgggcagttggcaggtcttcggactcgcgggcacgtcctcatgggggaggacacctactggccgtcgcttcccagaccctgtacatcgggcccagtgcgtatgacggcggtcgttcccgctcaccgctgcggggcagtcccggatttccaccgggttccctcttacgacgcgtcccgcctggctgacggggcgaaccagctgcaccggccaccctacggggtcgggtcgtacatgtggaatccccgaccggccttgcggcccagcagccccgcttccaccatccgctgcagcagcgggggaggggcgtagaggggttccctgaactcgtcgtacagggactcggcgatcgaggccacggtgtcgagcccgatcaggtccgccagcttcagcgggcccatggggtgggcgcagcccagttccatgccggcgtcgatgtcggcggcggtggcgaagccggactccgtcatacggatcgccgagagcaggtacgggacgagcagcgcgttgacgacgaaaccggcccggtcccgggagcggatgaccgtcttgccgagcgtgagcgcggcgaactcctcgacgacggccgccgcttcgggcgccgtgtgcagggacgtcacgagctccaccaggggcagtacggggacagggttgaagaagtgcagacctacgacccggtcggcgcggctcgtggccatgccgaggcgcatgacggggagggaggaggtgttcgtggccaggacggcctccgggtcctcgacgatcttgtcgagggccgcgaacacctccgccttggcgtcggcgttctcgacgacggcctcgacgaccagctgccggtcggccaagtccgccggctcgccggtgaagaccaggcgggcgagggcgtcctgtgcggcggaccgctccagcttgccccgccgtacggcacgctccagggaagccgccacccgctcccgcgcggcgtgggcggccgtggcgtcggcctcgcagacgatcgtgtcgatcccggcccgcgcgcacacctcggcgatgcccgcgcccatctggccgccgccgaccactccgacacgccggatgccgccgctcatgaccgggcctgcgtccggcgcaccaggtggcgggcataggcgtccggggtgaagaagagcggcaactcaccggtcagtgccgtgcgttcgaagagggcccggacctcctccacgggtgcccacgggtactcggcgcccagcgccgcgagttcctcgtcgagcagcccgaggaccgtctcccggtcgatcacccggtgccgcagccactgccagatctgcacccgggcgatctcggcggtggccgcgtcctccatgaggccgctcagcgcgacggcgccctgcccgcgcagccaggcggcgaagtagcgcagggcgaccgagatgttggtccgcacgccctccgccgtgggcggcccgctgatccggcgcaccgagagcagatccgcggccgtcacctccacgtcgtcccgcgtccggtcgagctggtgcggacgctcgccgaggacaccgtcgaacacctcgcggcacacgggtacgagtgcggggtgcgcgacccaggagccgtcgaagccgtcctcggcctcccgctccttgtccagccggaccttggcgagcgccgcctcgtgggcggccgggtccttgctcggcacctgcgccgccataccaccgatggcgtgggcgccgcggcggtggcaggtgcgcacgaggagttcggtgtacgcccgcatgaagggcgcggtcatcgtcaccttggcccggtccggcagcaggaagtcggtgcggtggccgaaggtcttgatcaggctgaagaggtagtcccagcggcccgcgttgagaccggagctgtgctcacgcagctcgtagaggatctcctccatctcgaacgcggcggtgatcgtctcgatcaggacggtggcgcggatcgtgccccgggggatgccgaggagttcctgcgcggtgacgaagacgtcgttccacagtcgggcctcgtagcggttctccagcttcgggaggtagaagtacgggccgtgacccgcgtcgatctgccgctgcgcgcagtggaagaagtacaggccgaagtcgacgagcgcggcgggcacggggcgtccgtcgtactccaggtgctcctcgtcgaggtgccagccgcgcggccgtacgacgacggtggcgagccgctcccgcccgtcgagccggtactccttgccgtcgtcggcggtgaagtcgatgcgccgctcgatggcgtcgagcaggttcagctgcccgtcgatcacatggcgccaggtgggcgcggtggcgtcctcgaagtcggccatccacacctgggcgccggagttgagggcgttgaccgtcatacggcgctcgggcgggccggtgatctccacacggcggtcggtcaggccgggggcgggcggcgcgacgtgccaggtggcgtcggcgcggacggcggaggtgaccatggggaagtcgagcggggacccggcggccaggcgcagggcctgccggcggcgttccctcatcaggtcctgacgccgcttgccgaaggccgccgccagccggccgacgaagtccagggcggcgggggtgaggatttcatcatggcggtgccccggggcaccgaggacgcggacatgatgggtcagtgaactgatggacatcgggtctcctgaagaggacgcaaacgaagggtgcggaccgaccgtcattccgtcgaacacacctgggggcgcggggctgtatcgacacgcggccaccgccgcgtgtgcgcgaccagcccccacgcacccgcagtcgacgaaccggacctagtggaactgctcctcctccgtggacccggccaacgccgtggtggaagaggcgggattcacggcagtggagaccaggtcgaaatagcccgtaccgacttcacgctggtgcctgaccgccgtgaagccgtgcgcctgcgccgcgaactcccgttcctgcaggtcgacatacgcggtcatgccgtgctcggcgtaaccgcgggccaggtcgaacatgccgtggttcagggagtggaacccggccagcgtgatgaactggaagcgatagcccatcgcgcccagctcccgctggaacttggcgatctggtcgtcgtccagcgcggccttccagttgaaggacggcgagcagttgtaggcgagcatctggtccgggtaccgggcgtggaccgcctcggcgaactcccgcgcctgcgccaggtcgggcgtacccgtctcgacccagatcaggtcggcgtacggggcgtaggccagaccgcgcgcgatgaccggcgccatgccgttgcggacccggtagaagccctcggccgtgcgctcgccggtgacgaactcggcgtcgcgctcgtcgacgtcgctggtgagcaggttggcggcgagggcgtccgtgcgggcgacgacgagggtcggcacatcggcgatgtcggcggcgagccgggccgcgttcagggtgcggatgtgctgcgaggtcggcaccagcaccttgccgccgaggtggccgcacttcttctccgaggcgagctggtcctcgtagtggatgcctgccgcgcccgccgcgatcatcgccttggtcagctcgaaggcgttcagcgggccgccgaagccggcctcggcgtcggcgacgatcggcgccagccagtcggtcgtgtcgccggcgtcctcggcggtggcgatctggtcggcgcgcagcagcgcgttgttgatccgacggaccacctgcggaacggagttggcggggtacaggctctggtcggggtaggtgtggccggcctggttggcgtcggcggcgacctgccagccggacaggtagatcgcctgcaggccggccttgacctgctggacggcctggccgccggtcagggcgccgagcgcgtggatgtagtcccgctcgtgcagctcgcgccacagccgctcggcgccgcgccgggccagtgtgtgctcctcgcggacgctgccggagagccggatcacgtcctcggcgctgtaggtgcgctcgatgccccgccaacgcgggtcggtggcccagcgccgcgcgagttcctcggccgcccgcgtcctcgtctctgccatgactgtcatgtctcctcggtctgtgccggctgccaatctccctgtccgtaggaacaggtgtggcactgtgtgtcgcttagctgggatacggcccgccgtcacgccgtgggacggaggtgagcaacgctgccggtgaacgaccccgtcggcgccgggatctccgacgtcagggcatgaatcgcgccccggttccgggcggtggtcgccggtgtccggcgggccgcactgagactctgacactggcactgagtgccaacaaccgtggacatctgccaacttctgcgaatcttctcgtcgccgttcgccaagtttgcgaagggcacgggagcggcccgatggcgtacgttggccgcagccggacacggaggatcacggggtgggcaagacgtacgccggggcgcgcctgcggcacctgcgcgaggaacgacgcatgagccaggccgagttggcccgtgtcctcgccatctcgcccagctacctgaaccagatggagcacgactcccggccgctcaccgttgcggtcctgctgcgtctgaccgaggccttcggcgtcgacccgggcttcttctccgcgcgcgacacgacgcgtctggtggcagacctccgcgaggcgctggccggggaactggccgaggcccgggtctccgccgccgacctgacggacctcgcctcgcggacacccgaggtcgcccgggtcctgctcgacctcggccgccgcaaccaacggctcgccgagcgcctggccggagccacggacggccgcggcccgggcccggagcagcccggctcaccgcacgaggagatcagggacttcttctaccgccgccagaattacctccacgacaccgacctcgcggcggagcggctctcccgggagatcggcatccggcccggcgaggtcctacgggcgctgaccacgcgcctcgccgaccgccacggcatccggctcaccgccgagcgcggcgaccatctgcaccactacgacgagccgacccgcacgcttcacctgtccacccgtctgcgccccggccagcgcgccttccgcatggccacccagctcgccctgctcgaacacggcgacgaactcgaccgcgaggccgccgaggacttcgagcccggatcgcccgcccacggcctggcccgcatcggcgtcgccaactacttcgcggcggccctgatcctgccgtacgacgccttccacacggccgccgaggaggcgcgctacgacatcgagcgcctcaccgaccgctacggcctcggctacgagaccgtctgccaccggctgagcaccctccagcgccccaggctgcgcggcgtgcccttctccttcgtccgtgtcgaccgggccggcaacatgtccaagcggcagtcggcgaccggcttccacttctcccgggcgggcggcacctgccccctgtggaacgtctacgaggcgttcgccgtccccggacgcatccacgtccagatcgccgaaatgcccgacggacagcgctatttgtggaccgcccgcgcggtgacccggcaccgcggcggctggggtgaacccggcaagaccttcgccatcggcctcggctgcgagatccgccacgcccaccgcgtcgtctactccgacggcctcgacctcgcgaacgcctccgccgccacccccatcggcatgggctgccgtgtctgcgaacgcctcgactgcccccagcgcgccgcaccgcccctcggccacccgctgcggatcgaccagaacaccggcaccttcgtgccgtaccccgtctccgacgcccggagttgacgcggtcggcgggagaggaagatcacggcgaccgaggcggtcttggccatgcacgcctggcgcggtacggtctgtccgatatcgacgacggcgagacggaagccggtgggaatccggcacggtcgcgccactgtatgcgagacgccttccggggcgtctggtgagtcagacccgtggccgtcgtcatgtgcaccaccgagatgggacgcgaactcccagaggaggttctgccatggcgcagaccgtcgcccagccgacagccaccacccccgtcgttcccgccacgctgccgctgaaggcgattgctccctgggcggtcttcttcggcatcctgatgctggtcctgctctacttcgtcggcgccgagcagggcgccacctccgtgttcaacggcacggacgtccacgagtgggtgcacgacgcccgccacctgctcggcttcccctgccactgacgccagggacgccgcacccccatgaactccgcaacggtaagaaacctcctcgtgcggggcatgctcgccggcctggccgccggcgtgctcgccctggtcgtcgcctacctgctcggtgagccgaacgtcgacaaggcgatcagcttcgaggacgcccactcccacgagcacgagatggaggtcgtctcccgctccctgcagtccaccgccggtctcgccaccggagtcctggtctacggggtcgccttcggcggcatcgccgcgctcgcgtactgcttcgcgctcggccgcgtcggccggttcggcccccgggcgaccgcgctgctgctgtccggctgcgcgctgctcgccgtgtacgtcgtaccgttcctgaagtacccggccaatccgccgtcggtcgggaaccccgacaccatcggcaagcggacgaccctgtacttcctgatgatgctgctcagtgtgctgctggcggtcgccgccaccatcctgggcaagcggctcgcgcccaccgtgggcacctggtgggcgaccgtggccgcggtggccgccttcgtcgtcgtgatcggcctggcctacgagttcctgcccgtcatcaacgaggtgccgaaggacttcccggccaccctgctgtggcggttccggctttcggcgctggccatccagaccgtcatgtggacaggtttcgggctgctcttcggcgagctggccgagcgcctgctgaatcccaagcccgcgacagccgcgtccagacgcgcggttcccgcctcgcactgaacgcttccggacaacgagagggcccttcggaaccatccgagggccttctcgcgtttccgggacaccggcggaggcgacgagcggaggagccgagtggccagacaccacccccagccgcgtcacatcaccctgggcggccgagaagcggtggccctgaccgtgcgggagtacgagcaactggtcgccagccgacgccagatcggcggccagagcgcacgggtgcgggtactggcccagcaggtcaagcgcgacgcgaggctgctgcgggaactcgaggccctggtcgccgacccggcttcccccttcgcctgtcacgcgccgggcgcggcagccgggacaccggacgcggccgggtgccccggccacgacggcacggccgacggcatggatcctgcctgtctgcggtgcgccatcgcggcgctgctgcgccgccaccgggaggagaagccctagcccccgaccgcgggcgccggtgtcagtgacccggcgcgtcgcccggcgcggcgagggcggctccgagacgcaggttccaccgccctgaccggccggtgacctccgtcgcggtgagcggcgggacgtcgacgcgccagaacgcggcctcgggcgcgcccagcacccccaccaccacggcccgtaccacctccggctccaccacggcgagggtcctgccgtcccccagccgttccgtgtccagccagcgcgcgaggcgggcgcacagctgccgcacggactccccgccgtgcggtgcggcgcctggatcggccagccagcccgccaccgcttcgggctcggcggcgctcacctcgtccagggtccgcccccgccatctgcccatgtccaggcccgcgagttccgggtccgccgcggcgtcgaggccgagcgccgcggccgtctcacgacagcgcacgccgggggaggcgacgacacggacggcggcgggcagggtcccggccgtcgctctcgcccgcgccgccgcgtcggcctcgatcgagtcgccgtcgtcgaagcgtgcacgccgcagcgacggtgtgatcgccgctgagacgaaggtgacacgactggtcacgcggttgttcctcctgctggtgccgcgggccggctcactgcgcgccgaacgcccgcaggatgcgttccgcggccagggtggccgtcaacgagccgtccctgacctgttgttcgagcgcgggggcggcctcgcggaccgcggggtccgcgtgcagtcggcccagcagttcgtcgcggaccatcgaccaggtccagccgacctgctggtcccgccgcttggcggtgagccgcccggtggagtcgagcagtgtgcggtgctgttccaggcgctcccacaccacgtcgaggccgatcgactcacgggcactgcaactgagcaccggcggagcccagaacacgtccttgccgtgcatcagcctgagcgcgcccgccagctcccgtgcggccgcccgcgcgtcgcgctcgtgcgggccgtccgccttgttgacggcgatcacgtcggccagctccaggacacccttcttgatgccctgcaactggtcgccggtgcgggccagggtcagcagcaggaaggagtcgaccatgtcggcaacggcggtctcggactggccgacgccgacggtctcgacgaggatcacgtcgtagcccgccgcctccatgaccaccatcgactcgcgcgtcgccttcgcgaccccgcccagcgtgcccgcgctgggggagggccgtacgaaggcgttcgggtccaccgccaggcgttccatccgggtcttgtcgcccaggatggaaccgccggtgcgtgtggaggacgggtccacggcgagtacggccacccggtggcccagcgaggtcagcagcgtgccgaacgcgtcgatgaacgtcgacttgcccacgcccggcaccccgctgatgccgatccgccgcgcccggccgctgtgcgggagcagctcggtgagcaactcctgcgccagcgcccggtgctgggggcgggtggactcgacgagtgtgatggcgcgggccaccagggcccgcttcccgtcgagcacacccttcacatatgtgtcgagatcgatcgctgccatcggccgctacagatcgtggccgaggtcggccgcgagtcgtcgcaccaggtcgtacgccgcgtccgggatcaccgtcccgggcccgaacacggccaccgcgcccatctccagcagcgtcggcacgtcctgcggcgggatcacgccgccgaccacgatcatgatgtcctcccggccctcctcggcgagcttctcgcgcagcgccgggacgagggtgaggtgaccggcggccagcgaggacaccccgaccacgtggacgtccgcctcgacggcctgccgggcgacctcctccggggtctggaacagcgggccgacgtcgacgtcgaaaccgaggtcggcgaagccggtcgcgatcaccttctggccgcggtcgtggccgtcctggcccatcttggcgaccaggatgcgcggccggcggccctcggcctcctcgaacgcgtccaccagggcacgggtgcggtccacggacggggactcgcctgcttcgttgcggtacacgccggagatcgtacggatctggctcgcgtgccggccgtacaccttctccagggcgtcggagatctcaccgacggtcgccttcgcacgggccgcgcgcacggccagctccagcaggttcccgtcgccgtcggcggcccgggtcagcgcgtcgagcgcgtcccggcactcggtctcgtcccgctccgcgcgcagccgccgcagcttctcgatctgctgggcgcgcaccgaggagttgtcgaccttgaggacctcgatctgctcgtcgctgtccacccggtacttgttgacgccgatcaccggctgccgcccggagtcgatgcgggcctgggtgcgggccgccgcctcctccacgcgcagcttcgggatgcccgcgtcgatggcctgcgccatgccgccggcctgctcgacctcctggatgtgtgcccaggccttccgggcgaggtcgtacgtgagccgctccacgtaggcgctgccgccccacgggtcgatgacccgggtggtgcccgactcctgctggatgagcagctgggtgttgcgggcgatgcgcgccgagaagtcggtgggcagcgcgagggcctcgtccagggcgttggtgtgcagcgactgggtgtggccctgcgtcgccgccatcgcctccacgcacgtgcgcgtgacgttgttgaacacgtcctgcgcggtcagcgaccagcccgaggtctgcgaatgggtgcgcagggacagcgacttggtgttcttcgggtcgaactgcgagaccagcttggcccacagcagccgggccgcccgcagcttggcgacctccatgaagaagttcatgccgatcgcccagaagaacgacagccgcggcgcgaacgcgtccacgtccaggcccgcctcgcgcccggcgcggatgtactcgacaccgtccgcgagggtgtaggccagctccaggtcggccgtggcaccggcctcctggatgtggtagccggagatggagatggagttgtagcggggcatccgctgcgaggtgaaggcgaagatgtcggagatgatccgcatcgacggcttcggcggatagatgtaggtgttgcggaccatgaactccttcagaatgtcgttctgaatggtcccggccagcttctcgggcggtacgccctgctcctccgcagccacgatgtacagcgccagcaccggcagcacggcgccgttcatcgtcatcgacacggtcatcctgtccagcgggatcccgtcgaacagctgccgcatgtcgtagatggagtcgatcgccacgcccgccatgccgacgtcgccggtcacgcgcgggtggtcgctgtcgtagccgcggtgcgtgggcaggtcgaaggcgaccgacaggcccttctgacccgccgccaggttgcggcggtagaacgcgttggactcctcggcggtcgagaagcccgcgtactggcggatcgtccagggctggttgacgtacatcgtcgggtacgggccgcgcagatacggcgtcatgcccgggtaggtgccgaggaagtccaggccctccaggtcacggccggtgtacagcggcttgaccccgatgccctccggggtctcccacaccggtgcctcgccaccggtcctgtgcttgacggccgtacgccagtccgcgtcaccgccctcggcgaccggggtccccagctcgatgccggagaagtcggggattcccatcaggacactcccatgcggtcgagggtcgcggagaggacgtccacggcgtcacagcccgcgaagacgtacgagtcgatgccggagtagtccccgcggcccgcgaggaacacctgccgggccccggccgcgcgcagcgactcggcgctctgggcggcctgttcggcgtagagggcgtcgctggagcacagcacggcctcggtggcgccgctgtcctcgaagcggccctcggtgaccggctcgatgccgcccgcctggaacaggttggcggcgaacgtcgcccgcgcggtgtacgcggcggccgggccgagcgtcgccaggaagatccggggccgggagccggtcgccgccagatgggcgtcggagcgggcgcggagggcctcgtacgcctcgtcccggcgcacccggggcagtccgccggacggcggctcgggcgccgcctcgcgctccaccggcttctcggcgagcagcgggaactcgctcacgccggtgatgggttcgcgccgcttggcgagcttcttggagcgctcggcccaggtcgtcgccaggtccgtacggatccgcccggagcgcagcacggccgcctggccgccgtcgcgctcgatggtccggaagaactcccaggcggcctgggcgagttcgtcggtgagccgttcgacgtaccaggagccgcccgcggggtcgatgacccgggccaggtgggactcctcgacgaggatcgtggaggtgttgcgggcgatacggcgggagaacgcgtccggcagcccgagtgcgtggtcgaagggcagcacggtgaccgagtcggcgccgccgaccccggcggccagcgtcgcgaccgtcgtgcggagcatgttcacccacgggtcgcggcgggtcatcatcaccggcgaggtcaccgcgtgctgcacctgcgcgcccgcgccgggcgccccggacacctcggcgacccgcgcccacaggcggcgtgccgcgcgcagcttggcgatggtcaggaactggtcggcggtggccgcgtagcggaactccagctgggcgcaggccgcttcgaccgtgaggccggcctcggtcagctcgcgcaggtaggccacaccggtggcgagggaggcgccgagttcctgcgcggccgagccgcccgcctcgtggtacggcagcgcgtccacggtcagcgcgcgcaggcccgggtagcgctcggcacagcgtgcggcgagcgcggcgacgggcgcgaagtccagcggggtgccggtgcgggcctcgtgaccgagcgggtccgcgcccaggttgccgcgcacggccttcgggtcgatgctcctgtcctcgtacagccgcagcagctcggccgcggcggcctcgacgtcacggccggcgtccaggaccaccggggccaggtcgagatagacgccgtcgagggcgcgcgcgatgccggacaccgggatgccgccctggcccacgagcagccagagcgaggtgacgccgttctccaggtcggcgaggacggcgccgtcgaccggtgccgcgtgccgctgccgtacgtcccagccgcccgtggtgttgccctcggggcggccgccgcgcacgaacggggcgaagcccggcagaccggggtcgggcgcgccgtcgcgcgctgtgtacaggggccgggtgcgcagcccgtcctcgagcgtggtggacagggcgtcctcagctgccgtacccgagacttccttgcccgacttgcgcagcacaccctcgaccaggcgttgccactgctcgtgtgtcgcgtcagggaactcggcggccagtgagagcccgtcgtcaggcaggaccgtcatggctcggatgctagggcagcagcgttgactcagagcagagccaggcttgtgacgtttccctc

SEQ ID NO: 50 - DNA, 125979 bp, Artificial Sequence
  modified BGC LTO010 3sites
cgaccgggccagcgcccacgatcactacgtcatgcacaagagatccccttccccaacccacagccggatgggcacccggcaggacctctcgaaacgtgccagaccccaccgacatcggaccgacagcccccgatatgacaccgacaccacggctacgccgctcgatcccccctggtcaaagcgccgatcagccaggaggaggctttacaggtcccaaccccggggactgtcccgttcgattcctggcgtgaagtcggctctgcgacggccaagcgatcactgtcgtcacggggcgggcagctccgtcttctacggcgacaccgacaagcgctggagctgggtccatgtcgacgacctcgccgacgcctacgtccgcatcctcgacaaccccgcggctgtcgacggggagaccttcgtgatcgccgacgagcaacggctgaaggctcttagacgtgcagcgcgcggccgtccgtgccgccggcagactgagccgatcggtgccggagcccgctcgggctcgccccgccggctccccgtgggcgggggagacgggggcggccgatgcgggctaccgccatcccgggcgcgtcggcgtcccgcagcgcgaagtgaccgcggcggcgttccgagcggccgagacatccgaggattgccgaatcggcaagggatggcggggctcgcggcgacgacgctgaatcagctggtgcagcccgtgatcgaggtgtgcacgttctacggcgttctgccgtgggagctgtcgtctcggccactggaccagtacttcgccgggccgggcaggcggggccacaccacgatccgcaagaagatcaccagcgtcgaccagtacttcgcgttcctcgaacagcgctacgccgacgagatcctgcgccggttcggggcggcggtggagtcgccggtcgatgccttcaaccggccccgtcatcgcggggacttcgggctgcggatcccgccgtcccggacggagatgaaggccttcttcacctcatggcgccaagaactgtgctcggcgcgcaagtacccagtggcggtccgcaactacgtgatggcgaagaccgcctacatctcgggagtacgtgcgaccgagctgtgcctggtccggctcggcgatctgcactgggacaacggccagtgggggccgcttcctggtgcggggcaagggggctcgcggctcggggccgcgcgagcgggaggcattcatgttcgccgagggccgtgaactgctgtggtggtacagcgaggagatccggggccttttccccgacgacgcgctggacccctacgctccgctgttcccgtccgagcggttgccgtccgcgctcggcgcggacgtggggatcgcgccgccgatgcatgccgataccttccggcgtgcgctgcgccgtgcctcgctcgcgcatttgaagggcacggtgacggtgcttttcccgcatctgctgcggcatgcctgtgcgacgcataactacgagtcgggatgccgctttgggatgttcaggtgctattggggcacgagtggccgaccacaacggtgggttacctggctaccgcgaagggggatccggagcgggccagcctggagtcgtcccggcgtgctgtacgtcggctgagtggggagacgtgacggagtgaagtggaatctgcgctgggtggcggccggaagggacatctggcggcccagtgatctgaagaccgcgtttgaggcggtcgggttcacgccgtcgctgagcaaggtgtgtgcgctgtggtcgcaggcgccggtgactgtgcggctggatgatctcgacatgatctgtgccggcctggagtgcacggtcgcggacctgatggaggccgagtcgctcgccaccgaggagagcggcaggcaggacgggcagcaggcggtcggcgggagcctgcgctcgggcagcggtggccggccggtgccgaagcagtctggtggcaagggcggtctgcgtcgtctgccgccgaactgagcatggcgtcgcggaaacctgccgggtggcgcccgttgtgcacgttcacacgtgctcacggcaagctcatccgtggccgcgccatccctgaccttgcccaagtccagaccgtgctcgaggagatggccaccgagcgcggagtcggcgagacgtggcgcttccacaccagtgagggtctgcggcttgcgctggcctcccgaccgccggacgagcgcctggtgcgtcccgaggcgctcgtggatctgccgcagatggggcccaccctgcacgcggctctgaagcgggccgggatgcttgcgccgctcaggccgcggctggtgcccttctggatgtcagcggatgtggggaactgccgcgagtgcctggcctggacgaacgagcgtgatcagcggtgtgcgtcctgccagaactgggcgatcggtcggccgacgggcccgtgccaccgctgcggtcgaaagctgccactcagggacgatcaccgccgaagctgtgtgctgctgatcgccgagaccgagtacgacgtcgacggcatccttctcgacggaggcgaccagctctggttcggcggccccttcgccctgcacctgatctgtacacgcgcccgtgaaggcggtctgtacgggcgccggcgcctgcagatcaagcggcgcgaagccgtggcagcgtcgcgggccgctcgccccgtctccgtgcatctcgcgcggcccggccagctggagttgttccacctggcccgcgactggaaccggctggacgaacgccgccttcccgccctgacaccggcggccaaggaggtgctcgacggcttcgtcacccacatccgcgcccgcggctggacgatgcaggccctgggacccagcatccgcaccctacgtgtcctgctcgcctacctgggaggcgaagccccgctgctggaggaggatgtgcgcctgctggcccgccgcagctgcttcagcggcgcgcgggtgatcaattactggcgtccgaccggccgtctcggccccaaccacagggcaaacgcgtacctggcccgggcccggcgcgcggctgatgacgcaccgggctccttccgccccttggtacaccggtggatcgacgtcctgtgcgggcaggcctctcagcccagctggccacttgcgccttccacggtctcctcccatgtgcgcctggccgcacctgtgctgtgcgcgtggtgcgcggacggcgtcatcgatctgcgggccatcacacgggaagacatcggggcggcactccagccgaagcgggggcaggccgcatcgtctctggccaccgcactgcgctcactgttccgtgcgctcaaacgagaaaggctgatcttccgcgatccggcccgaggcgtctccaccacgagcgccgttaccctgcccgggccactgcccgacgaccgcctgcggggcacgctcgaccgcatgccgtcagtgcgtcaccagctcactttcgtcctggccgccgtgcacgcgctgagcggccatgaccagcgccatctgctcctggacgacctcgacctgagtcgcggcacgctcctcgtacggcgccgggacaagcccgttcacaccctctacctcgacgacctcaccttccgcctggcccgacggtggcgggccgaacgccatcgccgttggccgaccagcaccaacccctacctgctcgtgaccgtgtgcactgccgtcgacgacacccaccccgccgtcagcccccaggcgatcaccaaatcactacgccggctgggcctgcaggtcggacgcctgcggatggaccgcattctcgacgaggccaaacacactgccgaccccgtccacctcatccgtctcttcggcctgtccccttacacagccaggcagtacgtccgagccgcgcacccatacggcggaggcccgagcccactgtgatctgccgaaggcggaccgtgtgtggtcaacgtccgctcgccagacggaccatcgagagattggcgccgtcgacgcgggcatcggctggctcggtcgcactgggcggtctcccaagctgaccagactatggcgatctcagcgtgcgatctcctgacggagttgggtgagggcgcggtgaagtgtgcttttgaccgttccgggggccatgccgagagtggcggcggtctcgaacgtggtcatctgctcgcagtaccgaagcacgacgacgctgcgctgcttgggggtcagacgcttcaggacttccgtcaacaaggacctgtcggcgtgctggtcgctggtgtccttgacggacgcctcgggtatgtgtgcggtcggaatttcttccagcttccgtgcccgccaccactccgtgcgcgtgttgatcatgacgcggcgcaggtaggcgtccgcgagccgtttgtcggcgatgcgtccccactggcggtacgtgcgtaacagtgcgatctgcaggaggtcctgggcgtcgagtgggtcgccgaccaggcgccgggcactgcgcagcagagcgtcgtgccgggtacggacgtactcctcgaattccagcaccgcggtgcgatgcttgcggggatccatgcgtgggctcctttcacacgcgggcatgagcggtcagtacgtgctgtgtggcggagcgacaccgagtgggcaggcccgcccgtcccggcgtcggctcaggctcggtaccgtgccggccgagtcgtcaggtcgcggtgccgtagcagtagtcgcacgcgtagccgacggtggagcgataggtgcaggaatgaacggcggcagcttgcggggccgacttggtcgcctcgctgccggcggcggcttgaacagccatgacgggtacggtgacgagcagtcccgtggccaggaccagggcgctggcggcgcgggtgcggtggtacggcacgggcatgtccgtctccttgtgggaagcaggggtggttggggttggtggcgggctgtcagcagcccggcagatgggggaccttgggggccgctcccgcgtacgtagtggttgctcacccaggccgggtcgctgccgtgcagcagggtgaccttcgtccaccacttgtttcccgcaaccttggtggtgtgccggttggtctggcagaacgcccgcagggtcgcatgggacacccgtgtgacaacccggcaacccgtgcgcgggcactcccgcagggccacctgagtgcccttgatacggatcttcctcacgccggcggccgaggtgttgtcggacaccggcaccagggtggaggtctgggcggccacatgctgcgcgccctgcgcatcggcgtgtgcggaaccggccacggccaggccgccggccagagcgagggcggtcgcggccggcgcgaagctgctgcgcacagtagaggacattgctgtactcctctcactggcgccgcacttcgcggcgcacttgggtcgttacagcggcagaccgggccgatcttggggcggtccgtgacgggttttgggcaacggccttccgcccgaacagggaggaggaccgggctgctggccgctcccctcgcgccggccagcagcccggcctccggaattgacggcccgtcatgatgggccgcctaccggggaggtgggtcagtacgagcgcctagtggatcctttggcagccggtcagtacggctcgctctgtcgtttctcggacccgtcgtcaagtcccatgaccacgtggtagccaggcccgtcccagtaccaggcggtctgatggaccttgtcccttcgcagaaccccgtgcgacagagtcttgtactctccgtggcccttattgcgccacaggtagtaggcgcagatgccggcatccgtcctcttgcggaacgtggcgaccacgaaccagtgtccgggcgccgtcttcttggcgtcgagttgggccgtgcactgaagattggagaaacggatgtgccgcacgtcggagtagtactcgatgaccgtcggcgatgcgggccttgcctgagcgggttgccctgaagccgcagcgcccggcccgccgctcagggccagggcggccacggccagggcgatcggcttgctgatggtggtgatcgacaccaggtgctccttcgaacgaggggctgctgccttccggaacggccgcgtgtgagatggcggccggtgaacagccggacctgacgtgcagatccggtgccgtacgacctcgactttcccggccgcgccattgaatggacagccggagccgccaccctgatcaatggcgacgtcacaggtcacgggcacggcgcagcacgctgaccaaaaagcgcgcgagagccgttgacggcgtggcgtcgggaacgccctgccaggcgacgactgtggcagccaggggctgtggagaagctgaaggtttctgaaagaaaggctcgtgcgccaactcccggacggtgtccggctcttcaggttggccacaggtggattccctcatgctggagccatgcgcgtactggtggttgaggacgaccggcggatggcggagctgctgcggcgcggcctggtcggtgagggatgggcggtcgatgtcgtgcacgacggaccgtcggggctcgagcgggcgggcgagaacccgtacgacgcgatcgtgctggacgtgatgctgccgggcctgaacggatacggagtgtgcggccggctgcgtgaggcgggcatctgggcgccggtgctgatgctgacggcgatggacggggagtacgacgaggcggaaggcctggatgtcggtgcggacgactacgtgaccaagccgttctcgttcgtgacgctcctggcccggctgcgcgcgctgatgcggcgcggacagccgcaacgccccgccgtgctgcgcgtcggggacctggaggtggaccccgcggcccggcactgccgtcgcggcacggtgccggtggccctgacggtgcgggagttctcggtcctggagtacctggcgcggcgcggcggtcagacggtcacgaagacggagatcctggagcacgtctgggacgaccggttcgatggagacgtcaacgtggtcgaggtctacgtcagcgccctgcgccgcaagatcgacacccccttcggacggcggtccatccgcaccgtccggggggtcggctaccggctcgacgttgccccggagggcgcatgctgagggctcgtcgggccgggcgagccgagcgcggtctgcgcctgggcagcgtgcgactgcggttgacactggccgcgaccgccctggccgccgtcctgctgacgctggccgccgtcgccagcgccgtcgccgtgcgcaactcgttggtggcctcggcgatcgagcgggtcaccaacggcacaagcgccgaggtggccgagtcgcccgtgtgcgaaaccggtcccgacaacacgtcctgcgtcgaaccgcctcccgactcgtcccccgacccgcgtgacacgcgccccctggtccgaggcgaacacctgtccctgtggccatggaccgacccgcacgacgccacgttcgtcgcatcggaacaggccgacgggacgttcccgccggacgtctgggcggaccagcaacgcctgaacaccaccgtgtggcggctcgccggcggcacgctggtgctcaccctggtgactgccggcgggacatggctggtcgtcagccgggccctgaaaccgttggacggaatccgcaaacagttcgccgcactgagcctgagcagcctcgaccagcgcataccgacggcgcgcggcggccgggagttcacgcaactggtggcgacgatgaacaacgccctggaccggctcgatgaagcggccgcccggcaacggcaattcacctccgacgtcgcccacgaactgcgcaccccgctcgcctgtctgcgcgccgaactcgaactcgcgctcgccccctccgggaacgcccactggcccgacgccgcccgtgacgctctgcacgacactcttcatgtccaggacatcaccacgaacctgctgctcctggcccgcctcgacgcccaagccccacactcgaagaccctcctgaccaagcaagtcgacctgcccgacctgatccgcgacgcggtcgcccgccgtgacgtacccgatcacctgagcctggtcgtcgccgcacccgacgaacccgtggccgtgaccggccacccgggcctgctcgcccgcgtcctggccaaccttctcggcaacgccgaacgccacgcggccaccaccatcgccgtcgcgctcaccctggaccacgaacgccgacaagccgtactcgacgtggccaacgacggcccgcccatctcgcccgaacaccgggagaccatcttcgaacgcttcagtcggctcgacgacgcccgcacacgggacgccgggggcaccggcctcggcctggccatcgcccgccgcatcaccacactccaccacgggaccctcaccctcgcccccagccaggaagaccaaccaggcgcccggttcaccgtacgactgcccctcgcccacgaggacgtcctgccgctggtcaccgaactcctgcacgcttgggaccagcccgacgacatccccgaactcttcacccacaacgccggacaccagcccctcgaagacgtcgtgcccgacctggcacgcgccctcatcacagccggacgcgaccaccacctccacgcactgctcctccacgtcgcccggaaggcacccgcctgggaagtcaccggcctcgccgacatcctccgcgacgaaggcatgcccgcagccgccgacgaactgctcgccgcccgcaccgcacgtgttcgttgaaccggcatgaccatgggctgacttcgcgtcctcgggcccggcagcaagcggcgcacgggcacggcgtggacacgtcgaccacatggcggcgcccacgaccgctcgaccttcgctccacgatgggggcctggccacccgtcgagggatgtgcgcgcatcttgctgccgacgtccgactgctggtcagcgccgccgcccatgactgcgcgtggaggtctcaagtacccgcgggcgcgttcttgcaaaatacgggcggaacggcccaggatccgcagcgcggtagccggtggcaggaccgcgagctggccgatcgtttccaccccgaggcgccgaagttcgacagcctggcctcggcggatgccataaaggtcctcgatcgcctgtggcgccaggaactgctccgtttccgatggcgccacgtactggatgccgcccctccccgggcgggctgaagccatggccgcgaccgaccagcacggcccgatgcccaccacagtgtccagcccgaaccacgccagagcctgcagccgtatccgttgcgcgagctcgaccggccctgccgcaaacagccggagggcaccaccagcctgagcaacagcagcgccaggcggcaacgcctgcacgatcggagtgaaccgccccaacacggtcatcagcccgggtagcccgccgcgctgccgcagcagaacatgaacgaacgcggcgacctcggtcacctcttgatcacctccccagtcactcggcgaaccggacggcgccttgcctcatccggcggggaccagccggtgtgttcacgaactgcggtgtgcgggaatctgcgagctggtcggattcatctgagcctcggcccgaaagctgccgccatcgcggaacccgtcgtgcggcggagccggttcagtcctggtcgttcgcgttctgttcggcgtggcggtggcggtaggtgtcgatctcggccatgtgttcctcggcccaggaccggagcgcggcgagcggcacctcaagagacagccccagtgcggtgatccggtagtgcacgcggggagggacggtcggctggactcggcgggtgaccaggccgtcgcgggtgaggtttcgcagggtcgccgacagcatcttctgcgacacgccgggcatcctgcgctggagctcggcgaagcgcacctcctccggggcggcctcggagagcaccttgatcgccatggacgtccatttcgtgccgatcctgtcgagcagccggcgcgtcgggcagtccggttcgaagaggtccccgcgtgcggtgaggggacccgtcgggcgggtggtcacctggagctcaccgtctttcgtgaaagtgccgtcttggtacgtcaactctagtcacctaggttcaggttgtaaccaatggttatcgcttggagttgatgtgatgtcccacgtgtcgcccccgccgcccgcccgccacgccgccggtccgggcaaacatccggacgtggagatacgcaccgtcgccgtcaacggcgtggcactcagggtggccctcgccggcgagggccccgcactcctgctgctgcacggcttcccgcacacctgggaactgtggcgggcggtcatcggcccgctggcccgacgccaccgggtgatcgcaccggacctgcggtggctggccaccggccgagaagcgcccgcgggggagcccacgggagcgggatacgacgccgcgacactcgcacgggacgcagagtgcctgctggaagcactcggcgccacgcgcgccgctgtggccggcatcgacgcgggagcccctcccgccttcctgctcgccctgcggcgccccgacctcgtccggcgactggtgctgatggagtcgctcctcggcggactgccgagcggcggtacgggcgacgggtggcccgcggcgggcgggccccggtggtggttcggcttccactccgagcccggtctcgcggagtccgtgctgaccggccacgaggaccggtacatcggctggttcctcgaccaaggcacgctcggtcgcggcgtccccaccgcgctccgcgaggcgttcatcaccgcctacaccggtgaggacgtcctgtgccgcgccttctcctactaccgcgccctgcccgccagcgcccgacagctccaggacgccgccgccacggcccggctcacgatgcccaccatggccgtcggagcgcaccccatcggtgccgcgctcgaacagcaactgcgcccgatcgccgacgacctgatcggccatgtcctcgaggactgcggccacatcatcccgctggaccgccccgcggccctgctcgcactgctccagcccttcctggcggccgacatcaccacatgagggcggccatggccctgactccgatcgaaccggccgcgccggcagagggagatgacgcagcagagcctccaggaggcgaacacccggatggagggcgttgtcgaggcggcgtatgccacgcccggctccgagacgaagttcaagccgtactgggacgcgtacaggaccagcaccgacaaggccatcgagggcttgcagggcgtcagcgacgtgcagcaggtctcggacgctttcgtgggcccgacgaccggaccgccggagtagccgccaccggagtgaccgccgccgtggtggtggttgccgtgacgcgcgccgtggtggcggttgtgctcgccgcggtcggcccaggcgccgggccccttgtggtcgcgtcggccgacaagcgggtcgcgtacgccactgccgcgcgcacccggatgcgctcctcggtgctcatgggcgtgccctggacggcgtgccgttccagcgcggcgatggtgtcgcgggagatggcgagggctgcctcgatcgacatgctgatctctccgagctggaactgtgtcaccgggcttgtcgcctgccgagccgggttctcgaacgacgtggcgcgttcgggagcacgctcgacgaaggactccagtgcgccctgcgcgatgccgatgggggtgcccacgctcgcggagagcaggaacgggaagaccgcataggagtactcgacgactcctgcgttggccgcggaggcgtggtcgcctcgcagcagtccggggagaggcagggcccggtcgtgcgggacgaaaacgtcccgggcgaccgaggtgctgctgcccgtgccctgcatggcactcatgtgccagtcgtcgatgatctccatctgggtggtgggaacgacggcgagatacggctcgttggcgccgtcctcgtgggccaggacggctgccagaacgttccacgtggcgtgcaggacgcccgtgttccagggccaccttccggtcagcaggtagccgccttcggtgggtacgagtgttccgcccggcgctgacactcccgcgacgcgggctcctgggccgctgaacaccagttcctggaccgggtcggggaacaatgccgcccagtagccgcacacggcgtacaacgccatcacccacgatgtcgatccgcacgcacgggcgatggtgcgcaccacttcgaactctgtcgccgcgttcacctgaagaccgccgaaacgcctgggcaccgtgagccgggtgatgccaagggtttcgagagcctcgatgccggcctcaggcagccgccgcagccgttcggcgtcggcggcgttctcacgcagcatcgggagcaactcctcgacggaccggaccaaagcgtggtcgacacggtccgacagcgtgcggaactccggcacggtggtgctcacgtctcctccagaggggttcggctcaggaaacgcggcacctccgcgttgccgagcctgctgtgtcaccgggtgctgtccggcaccgcgggcactcggcggaccgtcatcctgatccggtcgactgctcacccgacaggtcaatgactgctcgatcggtgtcaggaccgccgtggcccgggaccggctgccgcccgttgccccgcgcccgccgcgtcgtcgcggacccggacgtgctccaggagttcgacgggtgcggcgatcaggttggggtcggtgtgggtgtagtaggaagcgtccgcgacgtacaccgtgtcgccgcggcgtgcgagggacgtggggttctgcagcccgtcggcggcggtgagcaccgcggtgtgagagccgtcgggacggatgagttcgacccggttgccggcgttgtcggcggccagcacgtcgtcgccgtggccggtgaaggtgaagtcgtcgactgctccgagtccggcggcgacggtgtgcacggtgccgggggtgccatggcggccgatggggacacgcagcagtgtgcccttgtccatggtggtgacccagacggcgttgtcgcggatcttgagtccgttggcgccgaatccgctcggtgtgcgtgcggcgagctcgggcgccttcttccagaccgccgcggctgtgccgtccggcgtcatgcgccagatggcgcccagcgaggaatcggtggcgtacaggtaaccgccatgcagggcaaggccgttggggacgctgttcgccggcagggggaccacccggctggggacgtcgcccgggcggagcctccacaggccggtgaggtcagcggtgccggcggaataaaggacgtagagggtgccgtcggggagccggacgatgccgccgatgaaagcacggccggtcaggggtgcgtcggttccggtcggaggggccgggagcgtgcccaggacgtgcgttccgcggtccgcggtgaggcggacgatctggtgcgcgaaggacatggtcacatcgagggaaccgttcggttcggtcgtcaggttctccggctgctggccggccgccaggtcgaggtgcctgatgatgtgcgggctgccgaggccgggtgtcccggcggacgcgggcagggcggcgccggcgaacgcgacgaccgtggccgtggcggtgatccgtattctgctgctgatgcgcatttctgttctcctgagaaccgtcctggacggacggacggacgggtgcgggactgcgggctgttgtggctgatgctgtggcccggcgccgcactggttcttgccgtgcgcggcgatggacagcggctcccacgcgcgccacgtcgccgaggaagaagcgcagcggcgggcgggccgcgtctacgatctgcggtacggcgtcccgtgtcgcgaccggatcgccctgcacggcattgcgctcccgccgggcttcctgggcctgctcgcggtgaactgggcgacctcttgagcgagtgactggctgaacgtttccagcgcccacttcgacgcggcgtacataccgacgttcgggaaggcgccgacgccgctgatcgagctgacctgaacgatgtgcccggcgcgctgtgcgcgcaggaggggcagcgccgcctgggtcacccacagcgcaccgaacaggttggtgtccaactgcgcgcgggcctcggactcgctgatttggcgccgatcggatcgagcaagggctgcgagcagtagaggttggccacggtcagcccgccacgccacggccggcgcgagggccaccgtacggctcaccgcctgtggcacggccgatccgggcacacccgctgtcctgtccatgttcttccttctccgcctctctgcgtcgctacgaagccggcgcctcgtacggaaacagacgctacgaacgccgtgccgggcggagaagggtgtgccgcaccccctcccaggcagggtgcggtacacccaggctcggcgagcggacgacctggttcgggcccacgacccgcgtgaagcgggcagcgtgctgggcggctccagcagcatcaacggtctcgtgcatctgcgcgggcaccggtccagctacgacgcctgggcgcggacggcaacgggaagcagaccgagggagtgtcgtggaccgggacgaacgtggtcgccggccggcggcagagcgcggccgacgcctgtctgcgcccggtactctcccgccccaacctgacgttgatcacccgcgcacacgtccagcggctggtgctcgacgggacccgctgccggggatcgggcccgcgacgcatccgcgggatctggggatccctgtgcgcgccgaccttcccggtgccggggagaacctccacgaccatgtactgagctgggtgtcgtaccggacgaattggcaccggcagaaggtcgcgggcgtcgcccccgggcccgtcgtccgttcacagcgccgtgggtgccgcacaccctcccgggcagggtgcagcacacccaggttcaggacacggcgcgccgttacggtggtgcgtatgacgagggacaacgaactcggtgacttccttcgcgcacgccgcgacctggtgtcgccggtggacgcgggcctgccgtggcacacctcccgccgggtgcccggactgcgccgggaagaggtcgcgctgctcgccggggtcagcacggactactacacgcggctggagcagggccgggaacggcacccctcggagcaggtcctggaagccgtcgcccgtgccctacgcctggacggcgacgccaccggatacctgttcaggctcgcccaaccggctccgcggaccgcggtcaccgacccggcgcggacggtcagcccggaactgacccggctgatgaaccacttcctggaccttcctgcctgcgtggtcagccccgccctggacatcctggccgccaatcccgcaggtcagcagctctacagcgggttcgaccggatggacaacctgctgcgcatggtcttcctggaccccgccgcccggcggttctaccgggactgggatcatgccgcccaaggcgtcgtcggcaacctccgggcgctgtcggcccccttcccgaacgacccgcgcgtcgcccaggtcgtcggggaagtgtcgctgcacagccccgcgttcgcggccctgtgggccagatacgaggtccggccccgcaccagcgaggacaaacacctgtggcacccgctggtgggcgggatgcgcctgcactacgaggcgttcaccgtcaccagcgcgcccggccagcagctgttcgtctactccgcggaaccgggcactcccagcgccgacgcgctggtcctgctgcggagcctggccggtgacacgctcgccgagcactctgcccccggcgtcgaaagccgtaccgcccgctgacgcctcgatcacggagagcacgtacagacgtgccccggagagacgggcatcgacttccccggcactccggcaacgatgaccggcgctgctcggcgatatcgaactccccgatctgcatgaggaccctatctgggggtggcgctttcccgggcggcgtcttctcggtgatcgccttcgagcgccgggctggtaccgggtgatcacatccgagtacgaccacgtcatggaccgcgacgaacccgtgatgctcgatcagctccgggagccgctggtcaggctcgcggggccgccccgaagtgagcgcactcgtccggcacgccctcccggaccagttcggtaggggaatcgcccgcgcgtacagctttggccgatgcctccgtcaggaatccccttgccctcattgcagcgcaagcgcagttgccgcggggcgacggcgttcggccggggcccttccggcgtctctccgctcgggagaccaggccctggcgagccattcgcaccggcccgtaactggccgaacccgaaattcgtgcagccccgttttacgggcaactcctcgcccatggtggcacagaagtcggacagaactcaggcacaactcaggcacaactcagtgggatgcagctccgggccgacgaaccaggaggccagcggtcctgcccttgtggcgttggcggtcgggtctttagcgtggcgtcagcatttcagggtggctgcggatgccgggtgtcctgtcgacaggacgacgccgatctgtgaacccgcgccggccctgcgattcccctttcgagtcatcccgtgagcttgcagtgggcttacatggcgatagctagactgggcggttttatggacagcaagcgaaccggaattgccagctggggcgccctctggtaaggttgggaagccctgcaaagtaaactggatggctttcttgccgccaaggatctgatggcgcaggggatcaagatctgatcaagagacaggatgaggatcgtttcgcatgattgaacaagatggattgcacgcaggttctccggccgcttgggtggagaggctattcggctatgactgggcacaacagacaatcggctgctctgatgccgccgtgttccggctgtcagcgcaggggcgcccggttctttttgtcaagaccgacctgtccggtgccctgaatgaactgcaggacgaggcagcgcggctatcgtggctggccacgacgggcgttccttgcgcagctgtgctcgacgtcgtcactgaagcgggaagggactggctgctattgggcgaagtgccggggcaggatctcctgtcatcccaccttgctcctgccgagaaagtatccatcatggctgatgcaatgcggcggctgcatacgcttgatccggctacctgcccattcgaccaccaagcgaaacatcgcatcgagcaagcacgtactcggatggaagccggtcttgtcgatcaggatgatctggacgaagagcatcaggggctcgcgccagccgaactgttcgccaggctcaaggcgcgcatgcccgacggcgaggatctcgtcgtgacccatggcgatgcctgcttgccgaatatcatggtggaaaatggccgcttttctggattcatcgactgtggccggctgggtgtggcggaccgctatcaggacatagcgttggctacccgtgatattgctgaagagcttggcggcgaatgggctgaccgcttcctcgtgctttacggtatcgccgctcccgattcgcagcgcatcgccttctatcgccttcttgacgagttcttctgacatgcgagtgtccgttcgagtggcggcttgcgcccgatgctagtcgcggttgatcggcgatcgcaggtgcacgcggtcgatcttgacggctggcgagaggtgcggggaggatctgaccgacgcggtccacacgtggcaccgcgatgctgttgtgggcacaatcgtgccggttggtaggatcgtctagaacaggaggccccatcggattaggacggtggcagtgagcacgaacccctttgacgacgaggacggccgcttctacgtcgtgatcaacgatgaggagcagcactccctgtggccggtgttcgccgaggtgcccgcgggctggcgggtggtcttcggcgaggcggccagggccgagtgcctggagtacgtcgagcagaactggaccgacatgcgtccgaagagcctgcaggaggccatggcggcggactgaacgccgctcgcatccgacgggggagtggaacacgatgtccgtatctcgcctgtgccgagcgcccggcgcagagcggggcgtcgagccgatgcggcggaatccgtcgacatcgctcacggccaacggcggtgacgctcacgggccggccgggagccgtgggccggccggcggcgggctcgcggacccggccgggacgacgctgctcggtcccatgacggccggccgaagtggagacgtcccgtgagaaccgcgagcagtcacacggcgcggccggtgggcaccagcaatgagcccgagcggcgcatcgggaccagcctgcgcgagttcacgaactcctcggcgtggtggctcggcgaccggtacgcgtgggcggcgcggtggttcgacaccaccgcagaccggaaggcctcggcttcgcccaccacgccgaggtgacccgcctgtcgccaccggagcaggaccactgatcgagcgaggctcagcagcagaggcggtcgcgcaacgaactccgcggggcgttcgcgccggcctcgccgagcaggaccactggaccgctgtttccccgagcggcggcaacgagaaccaacgggtgccccgaccgaccgattcggcgggcgccgacaagcgccggcgaaaggccaccacgctcaccatcgagcgggtgaccgaggtgctcgacgccgctgagcggcgcaccaccccaagcctcactgcccaaaggctcaccgccccaaggcgccggacaagcccccgtccccgtggtgcgccgccggctcgcccgaccggacaccattcacatcggagtcagttgatgattcttcagggaaaacgggttgccctgccctcggcgcccgtcgtgcacaagcagttcgaggcgcacgtgaaggcgacccccgacgccgtcgccgtcgtctgcgccggacagcgggtgacgtacgcggaactggacgcgagggcgaaccggttcgcgcacttcctcgccgcgcgcggacacggccggggcgcgaaggtcggcgtctgcctcgactactcgaccgacatgctcgtcgccatcctcggcacgctgaaggcgggcgcggcctacgtaccgctcgatccggcctacccggcggcgagactccaactgctgctggggcagatccccggcctcgccctgatcgtggcctccccggcgacggccgggctggtggagtcggcggccgccgaggtcgtcgatccgcagcagctctccgatcagccggccggcctcccgacgacctctcctgacgtctccgtcaccggggacgacgtctgctacgcggtcttcacgtccgggtcgaccgggacaccgaagttgaccgcggtgcggcacgagggctggttcaacctgatgaactggctgatgctcgagtacggcctggaccgcgggtcgcacaacctggtcgtcagcgcgttcgggttcgacctctcccagcgcagcctgatgacgccgctgttctgcggtgccacccagtacctcatggcgagccggaacttcgacgcactgatggcgtaccgcatgctgaccgaccacgggatacgcacggtgcactgcgcctccagcacgctgtacctgctggtggactgggagaccgcacgcggaggtgaggcgctcacccggctggactacgtgctcttcggcggggaaccgctgaaggtcgaaaggatcgcggactgggcgcggcgcgaggggaacaggtgcaccctgctgcaccagtacggcgtcgccgagtgcacggatgtcgcgacgtcgtacgacctcgccgagtaccgtcccggcgaacatgacatcccgccggtgggcaggccggtccacaacacggagatccacatcctcgacgaggggatgcgtggtgtcggtgaggaggagtacggcgaggtctgcatctccggcagcagtgtcggcgcgggctatctcaacggcacgggtcccgagtccgagaagttcacgacggtcacggtcgacggcgagccgcgcaggctgtaccgcacgggcgaccgcggctacgtgacccgggccggggaactcgtcgtcgtcggccggatggacgcgcaggtgaaggtgcggggcatgcgcatcgaccccaccgacatcgagcgcgcgctcggcaggctggccggggtccgggaggccgccgtggtgatcggccacaccgacgccggcgaggtggaactggtcgcgttcatcgtcccgtcggaaggcgagctcgccgagagcgacgtgcgcgcccgcctccttcggacgctgccgcggaacatggttccggcccggtgcgtcaacatcccccggcttccgttgagtccgcacggaaaagtggaccgcaaggcgctggtcgacgcgtgccggaacgagttcgccgtgcgcggcacgacggcgtagccgccggaccttgatgacaaccgagaggactgtgatgattgccgacaaggtgcgtgccatttggtgccgcgaactccagcgcgatgacatatcggtcgacgacgatttcttcgcgctgggtggccagtccgtgatcatggccaaaatccagggtgctttcatcgaagagctgggcgtcgaagtcccggtggaccagatgttcctcaacccgacggtggcttcgatttcttcgtatatcgagtccatgggtgcggtgaccccctgacctcaggcgtcgttggcgcccttccatggttgtccggccatgactgcgttggaatccaagaaccactcggtatagagaggcgccatgtacgacgtcattgtcatcggtgcccgttgtgcgggttcgccgacggccatgcttttcgcgcgacagggttatcgtgtcctgctcctggagaaggcgcggttcccgcaggacacgctgtcctcgcactacatccacacggagggcgtggcgctgctcaaacggtgggggctgctcgacgcgctccgcgacgcgggctgccggccgatcgaccaccagagctacgaggcgccaggtgtccgcatcgacggcttctccctgccgatcgacggtcagcggacgacatatgcgccgaggcggtacgtgctcgacccgatcctcgcgggcggtgccgtggcggccggcgtggagttccgggagtcctgcgcggtcaacgatctggtgttcgagggcgaccgggtcgtcggggtgcggtacacgacgcccggcggcgccgaggcgacggaccgggcgcgcctcgtcgtcggcgcggacggcatgcgatcgctggtggcccgcaagaccggcgcgccgaacgtcatcgagcacccgcggatgacctgcacctactacagctactgggccggggttcccgcgcacttcgagctgtacgagcggcaggggcgctggatcggtgtcatacccaccaatgacgacctcgcgctgctcatggcctacttcccgcaggacgagttctccgagatccgcaaggcggtggaacccgcctacctcgatgccttccgcacgacggcgcccgagctgtacgagcggatgtcggcgggcgagcgcgtggagcagctgtacggcaccgggcaccaggagaactacttccgcaaggcattcgggcccgggtgggcgctggtcggtgacgcggtgaaccacaaggactccatcaccgcccgcggcatcaccgaagccttcgtccaggcccagtcgctcaccggccacatcggggagcggttgcacgacgacgcggcgctggaggacgcgctgcggcgctacgaggacgacctcgacgacgacgctctcagccactaccagggtgcgctcaacgtggccgagctcaagcccgaggggcgggccgagttgctgcggaaactggtcggtcaccaggagctgatcgaccggtacttctcgacgctgtcgggcgcctgctccatcgacgacttctacaacaccgaactcttgacgctgctcgaccagagctgagtgacggctcactccctggtagttctgccgatattggagacacaatgatcccgttgtcgttcgcgcagcgtcgactgtggttcgtggaccggttcgaaggtccttcgccggcctacaacggccctctcgccctgcggctgaccggtgagctgaacgtaggcgcacttcaggcggcggtcggcgacctcatcgaccggcacgaagccctccgcacggtcatcgtcgaggacgacgacggcgtcccgcaccagcgggtgctgccctccggtcagaagcggttcggcctgcgggtcgtcgaggccgcgacggaggaggagcgggcggcggcggtcgacgaggcggccaccgggaccttcgacctggccgccgacgtgccgatccgcgccaggctggtgcggcgcggaccgcgcgagcacaccctggtgctggtgatgcaccacatcgccgtggacggggagtccttcggaccgctgtgccgcgatctcatcaccgcctacacggcccgccaggagggcagggctccggcgtgggagccgctcccggtgcagtacgcggactacacgctgtggcagcgggacgtactcggggacgaagccgatccgcacagcctggcggccaggcaactggagtactggcggcggacgttggccgacctggcgcagccgctggcgttccccaccgatcgcccgcgcccgaagacgatgagccaccacggcgacatggtcccgttctcgatcgaccccggcctgctccggtccgtggagaagctcgccgcgcaggcggacaccacggtctcgatggtcatgcagtccgccctggcggtcctcctgcaccacctcggctgcggtgacgacgtgcccatcggcgcaccgatcgcgggtcgcaccgacgaggaactgcgcgagctcgtcgggttcttcgtcaacacctgggtgctgcgcgtcgacctctccgggaacccgaccttccgcgagctgctccagcgggtgcgggagcgggccctcgccgcgtacgacaaccaggacatgccgttcgagcggctggtggagctgctgaacccggaccggtccaccgcctacaaccccctcttccaggtgatgctcgcctggcagccccccataccggaaccggagttccccggcctcgacgtccagtccgagcggctcgagaccgcaacagccaagttcgacctgttcttcgacctgatcccgcacggttcgggcggggcgcggtgccgtctggagtaccgcaccgacctgttcgacagggacaccgtcgagggcatcgcgaaccgcttcgtccgtgtgctgggccggctcgtggccgacgcggaacgcaggatcggcggcatcgacgtactcgacgcggccgagcggggccggctgctcacccagttcaacgacaccgccacggcggtgcccgagctgacggttccggagctgttcgaaagccaggtcgccaggacgccggacgcaccggccgtcgtgtgcgacgaccgcacgctgacctaccgggagctggacgagcgggcagacggcgtcgctcgggagctggtgcgccggggtgccgggccggaggacctggtggtcctcgcgctgccgcgcacggaggacctggtggccgggctgctcggcatcctcaagtccggtgccgggtacctgccgatggacccgcagtacctcgccgggcgggccgagagcgtgctggccgaagcacgcccgcgcttcgtggtcaccgacaccaagacgtcgcaggacctgccgccgaacgacatgtcgagcatctacctcgatgaccgcgcgcagtgggacgcgcccgtgaagacgccggacgacgggggccggatctcgccgccgcgcccggacaacctggcgtacgtgatgtacacctccggctccacgggcaagcccaagggcgcggcgatcacccaccgcaacgtcgtcaacggagtgcgggaactgagtcgcgtcctggacgcgccgcccggctggcggatgctggccggcacctcggtgaacttcgacgtctcggtcttcgagctgctgaccaccctgtccaccggcggcaccgccgaggtggtgccgaacgcgctggcgctcggcgagcgggactcctgggacggccatgtgatcagcgcggtgccctcggtgctcggggaactggtcggccacctggagaagacgacggacgtgcgcacggtcgtgttcgcgggcgatgtccttccggcccggctggtgcggcaggtgcgcgaggccctgcccggcgtgcaggtggtgaactcctacggacagagcgagagcttctacgccaccacgttcgcccttccggcgtccgaggagtgggcggagagcgaggtcgcgccgatcggcacgccactgggcaacatgcgggcctacgtgctcggcccgggactcgccccggtgccgcagggcgcggtcggcgagctgtatgtggtggggacctgcctcggccgcggctaccacggccgcccgggcctgaccgctgagcgctacgtggcgaacccgttcggccccgcgggcgagcggatgtaccgcacgggcgacctggcgcgctggaacgcgcgtggccggctggagtgcctcggccgcggcgacggccaggtgaaggtgcgcggcttccgtatcgagacggccgaggtcgaagccgcgctcaccgcgcaccccgggatcagcgaggccgtggtgatcagccgcgacgtgtccccgggcgggcggcggctcgtcgcgtacgtggtgcacgccggcgagggagccgtcggtgacgacggcgccggcggcatcggcgatgtggacgtgctggccggtgcctcggccgccgagctgcgcacgttcgtcgcggcccggctgcccgactacatggtgccgtcggccttcgtggccctcgaccggatgccgctcgggccgaccggcaagctggaccgctcggcactccccgagccggagttcgtgggcgagggctaccgggagccgcgtaccgaagccgaggcgatcatcaccgtcgcgtacgcggacgtgctcggtgtggagcgggtcggcatcgacgacgacttcttcgcggtgggcggggacagcctgcgctcgatccaggtggtggcgcgggcccgggcccgcggcctggacctcaccacgcgggagatcttcgagtgccgcacggcggcccgcctcgccgaggtggcctccgcccgccaggaccgggcgcccgcgctcgcggagctcgagggcggcggcgtcgggccgatgccgttgcagccggtggcgcggcaggtgttcgagcacggcggcgggatgaaccgcttcgccatgtcgatggtgctcgagctgcccgcgggcatcgacgagcgtggcctcgccgcgacgctggacgccgtgctcgaccggcacgacctgctgcgcgcgcggctggtgcgcggtgacgagttctccctcgtcgcacagccccagggctcggtgcgggcggcggacctgatccgccgggtcggctgcgacggccggtgggacgacccgtcctcgctggaggcggcgaaggcggagctggacgacgctgtcgggcggctcgacccggaagccgggaccatggcggacttcgtctggttcgcccccgaggcggggacgggccggctgctcgtggtcctgcaccacctggtggtggacggcgtgtcctggcgcatcctcatgtcggacttcgccgaggcgtggcagcaggtccgggccggcaggacgcccgagctgcccgccgtcggcacctcggcccgccgctgggcgtcggccctggaggacgaggcgctctccgcggagcgggaagcggaactggcgtactggcgcgacctgctggaggtgcccgaccccgcactgggcacgcgggtgttcgacccggcggtggatgtgatgtccacggtcgacaccgtgcgggtgcaggtgcccgccgacgtcaccgaggcggtcctgaccaggcttcccgcggcgttcaagggcaccgggaccgatgtgctgctcgccgcgctcgccctggcggtcaaccggtggcgcggtgcggaccgttcggccctggtccgtctggagggccatgggcgtgaggaggacgtcgtccccggggccgacctctcccggaccgtcgggtggttcaccagcatgtacccggtccgggtcgacgtgtgcggggtggacctggccgacgtgctggcgggcggctccgcggccgggaaggcgatcaagctggtcaaggagcagttgcgccaggtcccggacaagggcgtcgggtacgggctgctgcggtatctgaacccggagaccgccgcacagctcgccgagtacccggtgccgcagatcgggttcaactacctcggccggatctccgactccgacgtccccgagcacctgcgcgcggacggatggggaccggcgtcatggtccgccgagctgatcgccatgcccgatccggatctgcccgcgctgtccgcgctcgaggtcgcctcggtcgccacggacaccgtggacggcacccggttgcagacggccttcatgttccccaccgggctgctgtcccgcgagcggatctccgaactggccgagctgtgggtggaggtgctgcacggcatggccgcgcacgcggcacagcccaggaccggcggcctcacgccctcggacgccccactggtctcggtgcggcaggacgagatcgaggcctgggagacgcgctacggccggctgaccgaggtgtggccgcaggcaccggggcagtccgggatccagttcgaggccgcgctcgccgacggctccttcgacgtctaccacatgcagttcgtgctccacctgtccgggcacgtggacccggagcgcatgcggtcggccgggcaggcgctcctcgaccgctatccgaacctgcgttccgcgttcctcgccgcggccggcggcgacccggtgcaggtcgtggcggaccacgtcgccctgccctggcggcacatcgatctgaccggtcgcgccgcggccgagcaggacgcggcgctcgaccaggccctcgccgacgaccgggccgaccggctcgaccccggcaagccgccgctgatgcgcctggccctgctcacctgcgggccgcggcaggcgaaactcatcatcacggcgcatcacaccctgttcgacggctggtcctcgccgttggtgatcaaggatctgatccggctgtactccacggccggcgggctcggcccggtccgcggctacggggactatctgacctggctgtccacgcgggaccggaaggcgtcggccgcccagtgggccgccgagctcaccggattcgaccagccgaccctcgtggcgccgaacgctcccgtccaggaagccgcgtccgccctcgggcgggtcgaggtaccgctgtcgatcgacaaggggcgcgaactcgcccggcgcgccgcggaactcggcgtcacgctgaacacgctcctgcagggcgcgtggggaatcctgctctcgaagctgaccgggcggcaggacgtggtgttcggagccgccgtcaacggtcgtccggccgagctggccggttcggacgagatggtgggcctgttcatcaacaccctgccgaccagggcgtcgtgccgaccggaccacagcgtcgcgcaggtcatcaccgatctgcagaaccggcagaccgcgctgctcgaccaccactactacgggctcgccgacatccagcgcgacgtcgggctgcccgccctgttcgacacgatcgtcgtgttcgagaactacccgatcgaccgtgcgggcatcgtcgacgcgaacaccgcggcgggattcacgatcgacgccatccggccgttcgcgggctcgcactacccgctcaccctcaacgcctccgacccctacctgcggacctccctcgactatcagaacaacctctacgaccgcgaggcggccgagctgatcgccgcccggctcgtccgggtcctcgaccaggtgctcgacgacccgacggtgccggtcggagccgtcgaggtgctgtcgcgggaggagtgggaccggctggtgcgccgggtcaacgacacggcgcggccggtggccgcggatacgctgccgggcgcgttcgaggcccaggtggcacgggaccccgaccgtgtcgcgttgatcggcgagcgggagaggctgacgtacggggagttcgaccggcgagccaatcagctggcgcactggctggtcgaacagggcgcgggacccgagcagttggtcgcggtgcgcatcccgcgttccgtcgacctgatggtggcgatctacgcggtggtcaaggcgggcgcggcctatgtgccgctggacaccgagctgcccgaggaccgggtgcggcatgtgctggacagcgccgagccgctgctggtgctcgacgggacgcttccggacgtgtccgcgtacccgaccacgaaccccgagcgggtgctgtcgccggacaacgccgcgtacgtcatcttcacctccggctcgaccggcggcccgaagggcgtgcaggtgtcgcaccgatcgatcatgaaccggttgaagtggggcctggcgcacttcgacgtcggcaccgaggaccgggtgctgctgagcacatcggcgagcttcgacgtgtcggtgccggagctgttcgcgccgttgcaggtgggcgccgccgtggtgatcgcgcgtccggacgggcggcgggatccgtcctatctggccgagctgatccggcgggagcgggtgaccggcgcggacttcgtgccctccctgctggaggcgttcgccggcgagcccgcggcgaagcggtgcgacagcctgcgctggatcgaggtcgcgggtgaggcgttcccggcggcgctggcgaacaaggtcgtcgatctgctgccggactgcggtgtgcacaacctctacgggcccaccgaggcggcggtggaggtcacggcgtggcagcacgtgccgggggcggaccgggtgccgatcggcgcgccggtctggaacacccaggtgtacgtgctggacgcggcgctgcgcccggtcgcgccgggagtggcgggcgagttgtacctcgccggtgccggcctcgcgcggggctacctcggccggagcgcgctgaccgcgaaccggttcgtcgcctgccccttcggccccgccggggcgcggatgtaccgcaccggagacctggtgcgctggaacgaggacggccaggtcgagtacatcggccgcaccgacttccaggtcaaggtccgcggattccgcatcgagctgagcgaggtggagtcggcgctgaccgcgcacccggacgtcgacaacgcggtggtcgtggtacgcgaggaccgcgccgacgaccagcggctggtcgcgtacgtggtgccgggaggcggcagggcggatccgtccgggctggatctcgcggccctgacggatctggtccgtgggcgtctgccggagtacatggtcccctcggcgatcgtgccgctcgccgcgttccccacgacagcgagcgggaagctcgaccgcaaggcgctccccgcccctgaccacaccgaagccacggccggacgagggccgcgcaaccaccacgaggaagtcctctgccggctgttcgccgagctgctcggcgtggaggagatcggcatcgacgtcgacttcttcgaccacggagggcattcgctgctggccacccggctgatcgggcgcatacgcagcgagttcgacgccgacgtgaaggtcacgacggtgttccgccatccgaccgtcgcccagctggccgagcagatccagaagctggccacgtcgaaacgtccccggctgcgacagatgaccgtacaggagaaccgtcgatgatcccgttgtcctttgcccagagccggatgtggatcctccacaagctggaaggcccgtccgcgacctacaacgtgccgttcgtgctgcgcctggaaggggtactggacacgacggccctggccacggcggtgacggacgtcacgaaccggcacgagagcctgcgcaccctggtcgtcgaggacgcgggcggcacggcgtcgcagcggatcgtgactcctgaggaggcggtcttccccttccgtgtggtcgacgtggccgcggacgcggtggacgcggcgatgcacgaggtcgcgtgcgagccgttcgacctggacacggagctgcccctgcggacgaccgtgctgcggatcgctccgcaggagcacgtcctggtgttcgtgttccaccacatagccgcggacggggcgtcggtggcgcccttcgtcagggacctggtgtcggcgtacacggcccgccatcgcggcagtgcaccgcagtggacgccgctgcccgtgcagtacaaggactacacgctgtggcagcggcagctcctgggtgacgaaaccgacccggagagcaccgcggcggagcagatcgcctactggaagaaagaactggccgaggtgccgcagccgctgcagctcccgctggacaggccacggccgacggcggccagccaccgcggcggcgaggtccccttcgtgctggcaccggagctgctgtccggggtgcagaagctcgccgcggaccatggtgccacggcgccgatggtggctcaggctgcgctggcggtgctgctgcacaagctgggtgcgggggaggacgtgccgatcggcagtccgatcgaagggcgcggggatgagcaactcgacgatctgatcgggttcttcgtcaacacctgggtgctgcgcgccgatctgtcgaggaacccgtcgttcgccgatctgctggagcaggtgcgggacaaggccctcgccgcgtacgacaaccaggacataccgttcgagcggctggtggagctgctcaacccggaccgcaccaccgcttacatgccgttgttccagacggcgctgggctggcagttcgtgtggggcgagatcgagatgccgggcctgcgggtcacccccatccccgtgggcaccggcaccgcgaagttcgacctgctcttcaacatcgtcccgaacgcgtccgggggcacgcgcggcctgctggagtacgcgacggatttgttcgaccacaccacggccgaacgcatcgtcgaccggttcgtgcgcatcctggagcaggtgctcgaggacccggcggtgccggtcggcgccatcgaggtgctgtcggcgcaggagcaggactggttgctccggggagccactgacacggcgctgtcggtgccggagcgaaccgtcgacgcgctcttctccgagcgggccgccgcgacgccggacgcggtggcgttggtgtgcggggacgtgacgctgacgtatcgggaggtggacgagcgagccaaccggctggctcgggtgctgaccgaacggggtgtggagccggagtcggtggtcgcggtggtggtgtcccgatcgccgcagtgggtggtcgcgctcttgggagtgatgaaggcgggcggggcgtatctgccggtggatccggcctatccggcggagcgcgtggcgttcatggtggcggattccggcgcggtgctggtgatcggggacgcggtctcggcgggacaggtgccggagttgtccgcgcccatgatccgcctggacgatccggacgtggtcgcggcgctggccggcgccgacccgggccccgtgaccgacgccgaccggcgcggtccggtggcggtggccaatacggcgtacgtcatctacacctcgggttcgaccgggacgccgaagggagtggcggtcagtcactcgggggtggccagcttggccgcgtcgcaggcggagcggctcgcggtgacgccggacagccgggtgttgcagttcgcctcgccgagcttcgacgcctcgctgtgggagtggagcatggcgctgctgacgggggccgcgctggtgctggccggcccggacgagctggccgcgggtgacccgctgatcgagacgatcgccgcccacggggtgacgcacgcgacgttgccgccggtggtgctggcggcgttgccgacgggggcgttgccgagtgtggagacgctggtggtcggaggttcggcgtcctcgccggaactggtggcccagtggtcggccgggcggcggatgatcaacggctacggcccgacggagatcaccgtgtgcgccgccatgagcacggcgatggtgggtgacggccgtactccgccgatcggccggccgatcgccaacacccaggcgtatgtgctggacacggcgctgcgcccggtcgcgcccggggtcgccggtgagctctacatcgccggcccggggctcgcccggggctacctcgggcggacgggcctgaccgcggaccggttcgtcgcctgccccttcggcgcgccgggcacccggatgtaccgctccggggacctggtgcgctggaaccaggacggcgagctcgagtacctcgggcgaaccgacttccaggtcaagatccggggtttccggatcgagctgggcgagatcgagcacgcgctgacgatgcaccccggtgtggcgcaggcggcggtcgtggtgaatgagaaccagctgggcgacaagcagcttgtggggtacctggtgcccaagccgtacgccgccgcggtggctggtgccgacgctcaggtggatgagtggcgccacctctacgacgacagttatgccgattccagcgatgaggagttgggcgaggacttccaagggtggaactccagctacaccggtgagccgatcccgcgtgagcagatgctggagtggcaggacgcggcggtggcacaggtgttgcggttcgagccgcggcgggtgctggagatcggtgtgggttccggtctgcttctggcgaagatcgtcgacgaggtcgaggagtactggggcaccgacatctcggccacggtggtggaccgggtccgggcgcaggccgcagaggccggatacggtgacagggtccgggtgagcgcccaaccggccgacgacatgtccgggctgcctcgcggccggttcgacaccgtggtgctcaactcggtggtgcagtacttcccgagcgtcgagtacctggaccaggtgctgcgccaggtgatggaactcctcgtggcgggcggccgcgtcatcgtcggtgacgtccgcaacgccgcgacacgcaccctcatgcagacggcggtgcagcgtacggcacacccgcacgcctcgcacgacgagttgcggacgctggtgaagagggagctgctcgccgagcgggaactggccatcgccccggagtggttcaccgagtgggcgggagacgactccgtcgcggtcgacatccggctgaagcccgggcaggcgcacaacgagctgacccggcaccgctatgaggtcgtcctgtacaagcgaccggctgacgtactcgacctggccggtgtgccgtcggtgccgtggggccgggaagtgcacgaccttgccgatctcggccgttgtgcggaccgggcgggcggtccggtgcgggtgaccgggatacccaacgcgcgtctggccgaggaggccgcactgacggtcgcgacgggtctcctcgacccggcgccccgctccggtgaaccggtcgatccgcaggaactgctccagtgggcacgcaaggacgatcgggacgtggttctcacctggtcgggggaggacacgcggtgcttcgacgcggtgctgctgcccgagcggcggaccgggcagccacatgtctcgggctcgttcgttccgagcggtgcgggcgggcgggtccgggcgaacaaccccgcgctggccaggtcgatcggtccgttgctcatcgagctgcccgagtacctgcgtgagcgtctgccggactacatggtccctcccgcgctcgtgccgctttcggagctgccgctgactccgaacgggaaactgaaccaccgggcgctgcccgcgccggactacgggcaggcagcgaccggtcgggcaccgcgcaatcaggtcgaggagaccctcagcgcgctgttcgccgaagtgctcggcgtggacaacgtcggcatcgacaacgacttcttcgccaccggcggggacagcattcgctccatccagatcgtcgcgcgggccagggcgcgtggcatcgaggtgagcacgcgggagatcttcgagcaccgtacggtcgcccggctcgcggacctggtcgaaggacgcgaggaagaacgcctcaccctggccgagctaccgggtggcggcgtgggatgggctccgctgatgccgacggcgaagcacgtgctcgcgctcggtggcggccttggccggctctgcatgtccatgatgttgaccctgcccgaaggcatcgaccgcgccggactggtggcgacggtgcagaccgttctcgaccggcacgacgtgctgcgttcccgactcgaccggacgcggcagggcctgtcgatcgagccggccggcagcgtggacgccggcgcgctgctgcgggaagtgcgctacggcgacgccgacgcgcacgccgagctggacgcggccgcggaccggctggacccggacgcgggcgtcatggcgcagttcgtgtggttcacctcggacacggacacggacgcggaccggttgctgatcgtgctgcaccacctggtcgtcgacggggtgtcgtggcggctcctcctgcccgacctggtctcggcctggaagcaggtccgggacggccgcaccccggaaccggcagggccgggcacctcgttgcgccggtgggcgcatgccctggccgacgaggcggcccgtcccgagcgggtggcggagctgcccgtgtggcggcagatcctgcgtggggacgagccggtactcggagcacgggagctggacccggcgcgcgatgtcgccgccaccgtggaaacggtgcgcgtccacgtgccggcggatgtcaccgagaccgtgctgaccaaggtgcccgcggtcttccggggcggtgtcgacgacgggctgctggcggcgctggcactggcgctgacccgctggcgtcggactcggggcgttcccgcttcgtcggctctggtccggctggaagggcacggccgggaagaggaggcggtgcccggcgcggatctgtcgcgcacgatcggttggttcaccacgatgtatccggtgcgccttgacctggccggcgtcgacgtggcggacgccttcgccggcggtccggccgccggccgggcgatcaagacggtcaaggagcagttgcgggcggttccgggcgacggtatcggcttcggcctgctgcgccacctcaacccggagaccgccgccgcgctgtccgcggaccgggaaccgcagatcgggttcaactacctcggccggacgtccggcacggatgtccccgaggagctgcgtggccagggctgggcaccggacaccacacagcgggacctgatcgccgcgccggacgcggacatgccggtgatgtcggcgctggagatcaacgcggtggccacgaacaccggcgccggtgacgagctgaccgcctacttcggcttcccgaccggtctgctctcccacgaggaggtgaccgagctggccgacctctgggtccaggcactgaccgccctggcccggcacgccgcgacacccgacgccggcggaatgaccccgacggacgcgcccctggtcgacgtgagccagcgggagatcgacacctgggaggctcggttcggccacctggccgaggtgtggccggtgacctcggcgcagtccgggatcctcttccattcgatgctggccggatcctcgttcgacgcctaccacgtgcaactggtgttccacatctccggtgacgtcgaccccgagcggatgagccgggccgggcagatgctgctcgagcgccacaccagcctccgtgcggcgttcgtcgacggggccgacggcgatctcgtgcaggtggtgccggcggcgggggtgaccctgccgtggcggtacctcgacctgaccgggtacggcgaggcggagcggaccgagacgttcgagcgcttcctcgcccaggaccaggccgcccacttcgacgtgggcaccccaccgctgatccggctggcactcgtcgccctcgagcccggccgggccgaactcgtgatgaccgtccatcactcgctggccgacggctggtcctcgcccttgctgctgcaggacctgctgctgctctacgcatcccacggcgacgcggccggtctgcccggcacgcggagctacggtgagttcctggcctggcgcgcacggcaggaccaggacgaggcggcacgggcgtgggcggccgagctcgacggggtcgatgaaccgaccctgctcgctccgggagccacgggcggcgacggactcgaccaggtcgaggtcgccctcccgctggacctgtccggcgaactcaaccggtgtgcctccgtgttgggcgtcaccatcaacaccttggtccagggcgcctgggcgctgctgctcggtcagctcaccggccgccaggacctggtgttcggcgccaccgtctccggtcgtccgcccgccgtgacggacgtcgagacgatggtcgggatgttcatcaacaccctgcccgtacgcgtggagtacgcgcccggcgacaccctcgccgaggtcctcacccggctgcagagccggcaggccggcctggtggagcaccactactacgggctcacggagatccagcagtccgtcggcctgcagaacctcttcgacacgctggtcgtcttcgagtcgtacccggtcgaccgggacggcctcagctccgccaccgacgccgcggacgggatcgccatcaccggtctgcgcccgtccaacggcacccactacccactggctctgatggcggcggtcgacacgcacctccagttcctcctccagtacacgcccggtgtcttcgaccgggacacggtggaggcgtacgcggcccgattcgtgcgcatcctggaacagctggcggccacccccgaactgaagaccgcgcagctcgatgtcctggagccggccgaacgcgaccgactcctcgtcgagttcaacgacacggccgtcccgactccggacgtctcggtcaacgcgctcgtcgaggcacaggcggcgcggaccccggacgaggtcgccgtggtcgccgagggcgagtcgctcacgtaccgcgaggtgaatgcccgggccgaccgcctggcgtgcgaactggccgcccgcggggtgggcccggagtcgatggtcgcggtgtcgctgccgcggtcggcggacctggtggtcgccctgctcgcggttttgaaggcgggcggcacgcatctgccggtcgatcccaggtaccccagccaccgcctcgcggccatcttcgaggaggcgcggccgcacctcgtgctgacggaccaggcgacggtcggcgtgctgccggagcacgacgccccggatgtcctcctcggctcactcgacctgtccggagacgtcaccggtctcgaaatcccgtcccacgcggatcagttggcgtacgtgatgtacacctccggctccacgggcaagcccaagggcgtcgccatcacccacggatgcgtggtcaacgccgtgctgcggctcgcccccatcgtcggcatggagccgggcaagcggctcctcgcggccgcgtcggtcaacttcgacatctcggtgttcgagatcttcacgaccctcgccaccggcggcgtggtcgacgtggtccaggacgtgctggtcctgggcgaccggaagggctggagcggcagcgtcatccacaccgtgccgtccgccttcgccgaactcgtcgacgacatcgccgaccgcaccagcgtggaaacgctcgtcttcgccggcgaggccctgccctcgtcgctcgtcgagaagacgcgggatgccttcccgggcgtacggatcgtcaacgcctacgggcagaccgagtcgttctacgccaccaccttcaccgtcgacggtgagaggccggtctcggcgggcagcgcgcccgccggcgccccgctgggcaacaatcgggcctacgtcctcggccccggcctgactccggtgccgccgggcgcggtcggcgagatatacatcggcgggaacgtggcccgcggctaccacggccgcgccgcgctgaccgccgagcgcttcgtccccgacccgttcggcccgaccggtgcgcgcatgtaccgcaccggtgacctgggccgtttcaatggcgagggccagctggagtacgtgggccgcggggacgcgcaggtcaaggtgcgcggcttccgcgtcgagcccgccgaggtcgaggccgcgctcagcgcgcaccccggcgtcgcgcagaccgccgtcatcgcccgcgacggccgcagcaccggcaagcaactggtcgcgtatgtcgtgcccgccgtcaccggcgacagtacgacgaccggtgaccctcgtggcccggagacgaaggagctgcacgacttcgtcgcggagcggctgccggacttcatggtgccgtccgccttcgtggtcctcgaccggctgccgctcgcgacgaacggcaagctggaccgggccgcgctgcccgagccggagtacaccggcgccgcctaccgggcgccccgcaccgcccgtgaggagtccctggccgcgctgttcgccgaggtgctcggcgtggaccgggtcggcatcgacgacggtttcttcgagctcggcgggcactccctgctcgccacccggctgatcagccgggcccgcgccgagatggggatagagatacccatccgcaagatcttcgacctgccgacggtggccgcgctcgccgcgtggtcggaggaatcggctgctccccgtcgccccggcctgcgcaagatgttcgtagaggagtagaagcaatgattccgctgtcattcgcacaacgccgtatgtggattctgcaccagatggagggcgggtcggagaactggaacatgccggcggccttccggctgaccggtgccctggaccaggccgccctcaccgcggcgatccgcgacgtggtcgaccggcacgagaccctgcgcaccgtctacgagacgaacgacgacggtgagctgtaccagcggatcctcccgacagcggaggccacgcctgaggtgccggtcatcgaggtggcgcccggggacgtgtccggcacgatcgaggaggccttcgggtaccggttcgacctggcggccgaacccccgctgcaggtacgcctgttccgctgctcaccccaggagcacgtcctggtcctggtcatccaccacatcgccacggacggcagctcggtcgcgcccctggtgcgggacctggccgcggcctacaccgcccgccgggacggccgggcgccggcgtgggagccgttgcccgtgcagtacaaggactacacgatgtggcagcgtgagctgctcggcgacgtggcggacccggacagtctcgccgcggcgcaggtcgcgtactggcgcaaggaactggccggggtgccgcagccgctgaacctgccgctggaccgcccgcggcccgtccaggcgagcgggcgcggctccacggtcggcctcatggtggagccggaggtggcgagcgggctgcagaagctggccgacgagcgcggggcgaccatgtcgatggtcctgcacgccgcactggcggtgctgctgcgcaagctcggcggcggggacgacgtgacgatcggcagctcgatcgccgggcggaccgaggaggcgctggccgatctggtcgggttcttcgtcaacacccaggtgctgcgggtggacctctgcggtgacccgtcgttcaccgatcttctcgcccaggtgcgacacaagtcgctggcggcctacgagcaccaggacgtgccgttcgacatgctggtcgaggcgatcaaccccgaacgctccgcggcctaccagccgctgttccaggtgatgctcggcctgcagaactacgagaggccggaactcgaactcgccggactcacgttggaggtcgagcagaccatcccctcgacctccaaggtcgacctgttcttcaacatgatcgtggacgactcgggggcgctgcggggcgacatctcctacgcgacggacgtgttcgaccgggagacggtcgaagccttcggggctcggttcgtgcgtgtcctggagcaactggtcggcgatccgggtatgtgcgtcggggatgtcgacgtgctgagcccgggggagcggcagcggctggtggtggaggtgaacgacaccgccgagccgaccctggagctggtggaggcggtgcgcaggcaggtgagggcgacaccggaggctctcgccgtcatcggcgaggaggagtcactcacctaccaggagctggaagcgcggtcgaacaggctggcgcactggctggccgacctcggtgtgcgggcggagtcgcgggtcgccgtgtgcctgccccggaccgtgaacctggtggtggcgctgcttgcggtgatcaaggccggtggagcctacgttccgatcgatccggaacacccgcgttcccggatcgactacatcctcgagcacgcggatccgctgctggtgctcgacgccgaggcgctggccggtgtggattggccggcgtatccggatgcggcaccggaggtggtcgtccggccggagaacgcccagtacgtgatctacacgtcggggtcgacgggcaagccgaagggcgtggcgatcccgcgcggcgcggtggcgaactacctggccacgacacagcggcggttcccgctgtcgtccgcggaccggatgctgttcagcacgacggtggccttcgacatggcgaacaccgagctgtacctcccgttcaccgccggcgcgaccatggtgatggcgggcaaggacaccgtcaccgacccgtcggccgtgctggagttgatacgccgccacggggtcaccgcggtgcaggccacgcccgccttctggcagatgctgttgatgcacgacccgaacgccgcgaagggtctgcggatcatcatcggcgcggaggccgtgccggtacgcctggccgagaccttggcgaagcaggccgccgaagtgttcaacatgtacggcccgaccgagacggtgacgtggtgcaccgaggcgcgcgtggaggtggggcagggtgcgccgatcgggaggccggtcgggaacacccaggtgtacgtgctcgactcgcggctgagcccggtttcgcgcggggtaccgggcgaactgtacatcgccggtgccgggatggcccgcgggtaccagggtcggccggagctgaccgcggagcggttcgtggcgtgcccgttcggtccggccggcgcgcggatgtaccgcaccggggacctcgtgcgctgggacgggaacggtcagctggagtacctcgagcgcacggacttccaggtgaagatccggggtttccggatcgagctcggggagatcgagcacgtgctgaccgggcatcccggcgtggcccaggcggcggccgtggtgcgggagaaccaggacggagacaagcgcatcgtgggttacgtgatacctgagcccgatgcctcgcaggccgacggcggtgtccaggcgctgctcgccgagctgcccgcctacctgcgggggcgtctgccggactacatgatgccctccacgctgatcccgctctcggaggtcccgctgaccccgaacgggaagctcgaccgcggagcactgccgtccgaggacatcaacgccgcggtcagtcgagagccgcgcaactcccacgaagagaggatgtgcgccctcttcggcgagctgctcggcatcgagcgggtcggtatcgacgacgacttcttcgagctgggcgggcactcgctcctggccacccggctcagcgctcgcatccgcggcgagttcgacatcgagatgcccctcaggacgatcatcaagtaccccacggcgggcgagttggccgcgctgttgctcgtcaccactcccgcggagtcctccgacccgctcgcggtcgtgctgccgttgaacagcgatcccggtacgggcaagccgccgctgtggttcttccacggaggaggcggcctcggctggacgtacttcagcttcgcgtcgtacgtgccggactggcccgcctatgccctgcaggcccgtggctccgacggcgtggacaagctggcggggtcggtgaaggagatggtcgaggactacgtcaccgagatgctgaagatccagccggaagggcccttccacctgatcggctggtcctacggcggcacggtcgtgcaggccgtcgcggaggcgctcgaccggcgtgggcacgagatcgccttcgtggccatcctggactcccagccgggtgggcacgggttcacggagatccatgccggcaaggccctgccggactaccggtccgaactcgaggaattcttcggccagtacatcggtaccgacaaccggcaagacttcctggacgccatggcgaaggtcctggccaacaaccacaccctcatgatggatttcgaatcgccggtctaccggggcgatgtgctgttcttcagcgcgacccttcaggaacgttcgtacgcgcatctgtggcggccctacgtcctcggttccatcgaggtgcacgacgtgcgtgccacgcaccacgaaatgaacatgcccgcggccgtggccgaggtcatggaggtcatcaagcgcaagctggcggagctgacggaatgaccggacagcgatctcccggaatcggttcaaagaaccatcgaatggatgattggggttggtcgtggtgaaggaacccgggatgtccgcggaaaacggcgatcaggtcacgctgttgtgcgtgccgttcgccggagcagggccttcgttcttctacccgtggcgggagttggccggcgaccggtggcgcgtggtctcggtcgagcttcccggcagggagaagcggctcctggagacgccgtaccggaatgtcgtcgaagcggcgaagaactcggtcgacgacattgtcgcggaactcggcgcgggggcgcggaccgtgctgttcgggcacagcctgggcgcggtgctcgcgtacgagctggtgcacctgctgagcacgcgtaacgtgcccgtcgagcggctggtcgtcagtggttcgccggggccgtggacacagcgagagaggcgggcgacgggactcccggacgaggagttcctcgcccgggtcgaggagttcgcggggttccggcacgaggccctggatcaccccgagatgcgtgaactgattctccccgtgctgcaggccgactgcgagatgcacgagaactacgttccgagcaccgacgaaccggtgtcggtgccgatctgttcgctgcggggcgactccgacggcctggtcaccgcggaagaggcgcggcagtggcgggacgcgactacgtcgagtgaattcagttatgtggagttcccgggcgatcacatgtacctggtcgatcgcggccgggaggtgctggacgtgatagaggcggaatccgcccgcagtcgctagaaatcctcgaagacgcgcatcaggtcttggcgtgatgcgagaccggggcccgaggccgcccaaggcccgcactctagtggtgcgggcctccgccggcggcccgaaaaacagtctcgaccagctcaccgcgctggtgaagacgcggctgaagcggatgcggtaccgcccctgcctccacgcccgggcaggcaggaattcccatcggacgcgccgccggctcggcccgacaggatgagccagtcacgtacgctggctgggaattcgtgtcctgtcggcgggacatgaatgcatgcgcaaggtccgcatgtgcctgcccgtcattcgggaccggtagatgaagcgcgaatacaaactccgtcacgcgccctcgcgaaagatcgcaggtagcgccccgcgaagacacctcgaacgcgtagagaaacggagtcgcgcaccggaaatccttggttgaacggtgtcggacgcggtggcatgctcctcaatgcgcctgaaggccagtcgatttcctgaacggaaggcaatcgtgatcacgcacatcgctcttttcaagctcaaggacggcatcgagcgctcctctccgtccgtggtcgaagccgagaagttcgccagggcagtcggcagccatgttccggaactcgtcgactggcgggtgggttggaatatggtcgaccgggacatttcctatgacttcgccgtgatcggggtgctgccagatctcgccgcgctggagaaatatcaggcgaacgcgttccaccaggagtccgtgcagaagtggcgagagatatccgactgggtcgtcgccgacctggaagacagctgaaggaggactgggtgttcacgcaatacgacccggaatccgcggcgctcacggacgagctgcgcggattgttcgacgagttcggcaagggaaagtggacggctgacgagctggaaacccatcagaccgccaagctgcgcacggtacttgcctatgtccgcgccaactcgccgttctaccgcgccaagctgaacgggatttcggacgagacgctcgccggactgcacgtcagcgatatccggaaccttcccttcaccaccaaggcggatctgcagcaggcgcagttcgacatgctctcgctgcccgtgtccgacgcctggaccttctacgagaccaccggcaccaccggaaagcccaccccgtgcccccgcaccaatggggacaccattcacaacaacaccgtgctcaccgcctattaccaggacatcttcgcgcagcacggcaaccggcaggtcatcggcatttccggccccacggaactgcacgccaccggggacacgttcggggacgtgtgccgcaacctggggcacgcggtggccaagatgtggccgcactcgccggtgatcggattcgaccgcgccctggaggtcctgcggctgctgccggtgaccgggctgttctgcaccccgggcatggccctgcggctggcccagaaagcggtcgaggcggggctggacccccggcgggacttctccctcgacctgctcatgctcaccggcgagctgatgtcgcccagcctccgggacaacatcggcgcgctctggggggccgaggctcacaactgcctctacgcgtcacaggaggcctccgtcctcgcggcggccacctccgacggcacgctgcgcatcgctccgctgatcaaccactacgaggtgatcgaccccggtaccggcgagcccgtggcgcccgaccccgacggggtgcgctacggcgaactcgtcgtcacgaacctctacaccggcgccaagcccctcatccgctaccgcaccggggacctggtgcggatgacggaggccgggcccggcgccgccgtaccggcgccggcgctggagcccgtcggacgtgtccgcgaccggctcgggctcaacgggcacctcgtcaacggctacgacctggagaacctgctgctccgtcgcttccgcggctacctcgactaccagatcaccgtgacccgtgacgacgcgggcacggacctgctttccctgacgctcaacgccgacccggaccggcactggggagacgacatcgaacgggccgtcgcggactgccgagaggaactggacaccgcgctgagcgtggccttcggtgaccccggccccatcaccagcaccggagccatggtgagctggaaggccgcgcgcgtggtggacctccgcgacccgggcgccgggacctcggtcgagtcccgctcggccgagcggatcgccggggcgagggcatgacggccggcccgtcccccgccgacccgccccccgtcggcgcctcccctccgcggcgacggtcgcagctcggcctcggggcatgggcgtacgaccgcggcgagttcgtttcggcgcaggctccgcggctgccgctctccacacagggcctgcactacgggaccgcggtgttcgagggaatccgtgcctaccgctcgcacgacgggctccacctgttccgggcgcacgaacactacgcgcgcatgctgcgcgcatgccggatgctgcgcatcacgggcatcccagcgacggtcggggaactcgtcgacatcactgtcgagttgctgcggatgaacgcgcacgacggtgacgtctacgtgcgtccactggcgcacaagctctctctgctgcctggcaccccgcccggggtctcgctggccggcgtgtccgacgcgctgtccatcaccacgttcggctatccgacggccggtgacgtccaggaggtgcgctgcgccctcagcgcgtggcggcgcccgccccgcgacacgcttcccgcgcaggcgaagatcgccggtggctatgtgaccagcgccctcgcctgcgacgaggcccgcgcggccggatacgacgacgccatcctcctggaccggtccggcaacgtcgccgaagcgaccaccgcgaacgtgttcgcggtcagggacggcgtcctcgtcaccccgccggacacgggcgacctgctgcccggcatcaccagggacaccgtgatcaccctgtgccgagaggccgggatgacggtcctggaacgccccctcagccccgcggacctctacaccgccgaggaggtgttcctcacctcgaccggcaaggaagtggcctccgtggtcgcgctgtccggccgggacatcggaagcggcaccgcaggaccggtcgcggcccgcgtcgccgcgctgtaccgcacggccgtgacggctcaggacgctcaggagccagccgggggcgagagccgtccggagtggctcactcccgttctgccgtctgagtacctcggcgcgcggccggcgcacgttccgccgacgcccccggagtttcccctcccaaccgaacacctacgccaagcaaagggacatgcggatgacgctgcatgacttcatctcactcctgcgccccggctccgaacagccctcggccgtcggcacgctcggcccgcccggcacgagcagcgaagtggcggcgaagcggtacgccgcccagatgtccgggctcgacgggccaaccatcgacgtccagctgttcgacacctacgagaaggcgggagaggcgctccaggcccgtgatgtgactcatgtcgtcgtggccaacgcctacaaggaaatcaacccgttctacatggacccggccgtcgagctggccggggtgttcgtgatggataccccgctgtacggaatcgccatggcccgcggaggcggaccggtgccggatgccccgaccgtcgcgagccacccctcgcccgagccgatcatcgcgcagctcctgccgcgtcgccacgcgacgtacaaggtgatccaccacgactccaccagcgccgccgcccgtgccgtcgtggagggaaccgccgatctcgcgctgaccaccgtgccggccgcgcagctgcacgacctggagttcatctcggggacccggcccatacgcatggtctggtcggtgttcggcagggcggtgcccacacgcaacaaggagacgagcccatgctcctcctgaacggagaccaggtacgagaggccctgccggtggccgaggcgcaccgggtggtggccgaggtgatgcgccgttacagcgcgggcgacgtcgtccagccggtgcgcaccgtgctcggatccggcctggacgcctcgctgttcgccgccatgccgtgccatgtcgccggcgagtcggacgcgggatacggcatgaaggcggtgctgcacgcgccaggcaacagcgcccgcggcctgccgacacacgtgggcatggtggtggtgttcgaccccgagaccgcgcagcccctggccctgatcaacggtgcggccgtgaccgcgctgcgcacggccgcggcctccgccgtggcgaccgaggccctggctgccccggacgccggcgacctggctctgatcggtgccggtacccaggcgcgcagccatctgctcgcgctgcgggacattcggccgctgcgccgggtgcggctgtggaaccggggccacgcgcgggccgaggagttcgtggcgtgggcgcgtgcggaggccgacgtcggcgtcgagctgacatccacgcccgcggacgcgctgcgcggcgccgacctggtgtgcacgacggtcgacacggccgaacccgtggtccgcgcagcggacttggcggacggcgtgcacgtcaacgccgtcggctcctccgtcccgggcaagcgcgagctcgactcgggcgcggtggcctcctgctcggtcttcgtggacagcagagagggagccctgcgcgagtcctccgagatcgcggcgcccgtggaggaggggctggtgcccgccgaccggccgctgcccgagatcggcgaggtgctgctgggcaagcaccccggccgtacgagccccgccgagcgcacgctctacaagtcgctgggcatggccgcgcaggacgtcgcctccggattcgccgtcgtccgtgccgcacggcgcctcggcatcggcaccgaagccgacttcacctgctgagaccccgcgtgagaggacacggtatgacggcactactgattggcaatgtcggagtcatcggcgacgagcggcgcatggcggagtaccgcgcgaaggtgctggacacgctgcggctctacggcggagggttcgtgatccggggtggggagtccgaggcactggaaggcgactggcagcccgagcacctgtcggtgatggggttccccacggccgagcacgcccgccgctggtacgactcgcccgaataccgcgccattgtcccgctccgtgacggcacgcacatggacctgatcctggtcgagggtgagggcgaatgacgccgccgtcccgccgtcggcgttccttctcgcaggtggacgtgttcaccgaggtcccctacctcggcaatcccgtcgccgtcgtcctggacggcgacgggatctgcgaccgggacatggcccggatcgcggagtggaccaacctgtccgagacgacgttcgtcgtcccgcccacctccgacgaggccgactacgggctgcggatcttcacgccgggcggtgagatcccgttcgccggtcaccccactctgggctccgcacacgcctggctggaggccggaggcactccgaagaagcccggagagctgacgcaggagtgcggcctcgggctcgtgaaggtgcgactctccggcgacgggctgggcttccgcgcccccgccctgcgccgcagcggtcccctggacgacgcgcacctggatcgcatcgcccgcgggctgcggatcgaccgcgcgcggatcgtcggccaccagtgggtcgacaacgggcccggctgggccgccgtacagctcgcctcggccgatgaggtgctggccctggagccggacgagcggcacatgcgcgagctgatagtgggtgtggtcggtgcccaccccgagggctcacccgtgcagttcgaggtccgcgccttcgcgctgcccaagggcgtgcgcgaagaccccgtcaccggaagcctcaccgcggggctcgcccagtggctcatcggcaacgggacggccccgcgcggcttccgggtcggccagggcgcacgcctgggacggcagggcgtgctcaccgtggaggcgcagggccaggacatatgggtcggcggcgcgagcgtgacctgcgtgcggggcgcccttcaggcgtgagaccggcggcttcttcctgtccgtggggtgtccgctgtcccgccgacgggacagcggcactcgcgcgactccgcaccaccgcgaacgaacggtccgcctgtttcgggatgccgtttcggggagttcacgctgttgaccgagagggtgacccgaccaggcagacgatggcagactggcggcgcatcgaggcgccattgttcagggcgatttctcatgagaaccatgactttgaatcacccctgccttggtaagtgcgtggacgcgatggttgtcacttgtcggattccgtgacgagaatagatgattgattctggcggcgacttgaccgccatatgcgaatatgccctgggggcagcgatggtaaaggaattaagcgcgccgacgccgggccggcggatttactcgctctggggtggcgacgccgatgcacggtgcctgctcgaatcgttggccgagaccgcacgcacgcgaagagaagatatcgcggtacaggacgagacacatgaactgacctatgggcggctcatgacgtgggcgagtaatatcgccgaccttctcgccggccacggtattcgtccgggcgaccgggtggcggtcacggggcctcgcggtgccgcagtcgtagcggcgatgctggccacggtgagcgcgggagcgacctatgtgcccctcgacgtcgagtatccggtcagacgcctcgagcacatggccgccgacagcgaggcccggctgcttctgttcagcggcgacgaaccggctttcgacctcagggcccaggcggtccgcatccccgacgcgccggacctgagcgaccaggaggccattgcggcgctgtcgcggctgtcctgccggccggacctccccgtgtacgtcatctacacctcgggctcgaccgggctgcccaagggcgtcgccctgccccatcgctgtgtcgacaacatggcggcctggcagtggcaacactcggtgcgcccggacctgcgcacggcccagttcgcaccgctcaacttcgacgtgtggttccaggaagtactcggaacgctgtgcggcggaggaacgctggtcgtcatgcccgagttcctccggcgcgaccccatcgccctcctggactggctcgccgaccaccgcatcgagcgcctgttcctcccgtacgtcgccctgcacatgctcgccgtggccgcggaggccgcggactcgctggagcacctcgccctggcggaggtgaacaccgcgggcgagcagctcgtgtgtacccccgcggtccgggagctcttccgccgcctgcccggctgtcggttgaacaaccactacggacagagcgagtccgccatggtgacggtgcacacgctcacgggctccagcgacgactggcccgcgctccccccgatcggacgtccgctgtcgggctgcgagatcctggtcgacccgaccgagccgggtgaaccgtcggtgggcgaactgctggttgccggcgcaccgctgtccgtgggctatctgcaccagcccgagctcaatgccgagcggtacgtcaccctcgaccggacgacgccgcaggggcaccgccgcgcgttccgcaccggggacctggtgcgcgtcgagggggacacggtgcacctcctcagccgtatcgacaacgaggtgaagatccgcggggtccgggtgaacccccttgaggtggacgcctgcctgctggagcagccggggatcgtcgaggcggtcaccgtggtggtggacatcgcccagggatcccggcagctgcgcgccgccgtgacgtcggacgtcggtgtgggcgagttcgacgccgcgagggtgctcaaagcgctcaccgagctgcttcccgagcagttcataccggtctcgatcaccgtactgccggaactgccgcacacccccagcgggaaggccgaccgggctgccgtcgccgccgcgctcgcgccgtcgtcgccatgacgccggacgagtggactaccgaggggatccagacctcgctgagaagcccaccccgctgatccttggcgacccggcgcgccgcccggcggcgcacacctcagcgtgccggcgacctgaagggacgtgtgcgcggcgaggagacccgcgacgtagtccgggaattcccggagaagctggataaacggaatcgatccgaacaggggtggcgcatgcaagacaacgacttcggcacaccgaccgagcggcggctcgcggacatctgggccgacatcctgcggctggacaacgtcaagcgtgaccaggacttcttcgacgccggcggagactcgttgctggctacgaaggtcgtcctacgggtgtgccgggaatgggacatcaaattcacggtcagggtcctgaacgacgcgccggtcctggccgacctggctgaacgcatcgaccagcgggtgacgaagtcgggacagccgtccgcgggcgcaccctcgccggcagcccgcgcgagccgggccggagcatgtttgtgggagatgcggccggggacggcgggcgccggacaggacacgttgctcctcctgccccatgcgggagggtcggcacagaactacgcctcgtgggcggacttcttccccaaggacctgcgcatcctcgcggcccagtatcccggtcgggcggcgcgcgccgacgagccggccgcggccgacctccatcacatcgttgacgagatcctcgatgcgctgggcgatgtcgaagggcggctctacgtcttcggccacagcatgggctcctacgtcgggtacgaactctgctggagacagcagttggcgagccgcccgcccgtggccctcttcgcctccggggccgttcctccgcacaggcaccggccgaacccggcgaccgaggaggagatcacggacgagtggctcatgaaactcctggacatgtacaacggcgttcctgacgacctcatgaattacccggaggtcataagccaggcgctgggcacgctgagatccgacgtagtgctcttccgcaactattcgtacggcgatcggcggcgtcggttggagatcccgatcgtggcgttcggcggagaacgcgacgaccttgtgcccgccgccgaggtggaacgctggcatgaactgggcgcagcggaatgtgccacgcacatcatcccgggcgggcatttctattacctcgacaatacggcgacggtcacggccgccatgtccaagtatctcgtgagcgttcatgacgggcagaaggaataggagatcgcgagcatgtccagccaagaattctccgggatcacggatgccgggacggtcatgtcggatcgccggaagatcgtgctggtggaacttcccacctacgagaacatcctgccgctcgcctcgggctacatccaggcgtacgcgcaggccgacgaggccgtcgcggcggaccacacgttcgagatcgtgtccctcccggtgtccgccgaccggcgtcagatggtccgggagctcgctgacagggacgcgtacctctatacgttcagctgctacatctggaacatgaagctggtccgctggctgctgaaggaactgcgcgcactgcgtcccgacgctcactacctgctgggcgggccacaggtgatgaaccacgccgcgacgtatctcagcgacggtgcggagaacgtctacgtgtgcaacggcgaaggggagcgaacgtccctagagttcatccggcagctcggttcgcagacgccggacatgagccaggtaccagggctcagcttctggtcctcgggcgaactcatcaccaccgaatcggcgcccaggatccagaatctgatggacattccgtcgccgttcctgaacggcgtcttcgaaggtcacgaattcagcttcgccatcatggagacgaaccgcggatgcccgttccgctgcaccttctgctactggggcgcggccacgaactccaaggtcaacaagtacgaagaggatcggatcaaggatgagctgaagtggatcagcgagcacgggtactccgcgctcatgatcgccgacgcgaactggggcctgtcgccccgcgacgtcaccctgagcgagtacatcgtcgagtgcagcgaggagaccggctacccgctgatcgttcacatggccgccgccaagaaccggcccgagcgcatggcggagatcaccgagatcttcgtgcgcggtggactgatggtgagccagcccatctcgctgcagacgatgaacgagtcggcgctggagatggtggaccggaagaacatccgcgaggacacctacatcgggctgcagcgcctgctccgggagaagcggatcagctcgtacgtggaaatgatctggccgctgcccggcgagaccctcgagtcgttcaaggacgggctgaccaggctgtgccgctcgtacgccgacaccatcatcgtctacccgcagttgttcctgcacaacacacccatgtacgcacagcgggaaaccctcggcatcatgaccgcggaggcggccagcgacgtgtccgaggcggaggtcgtgctcggcacgaaatgggtgaccgaggaagactgctacgagggctactgggtgaaccacgcgctgtacacgctgtacaacatgcgcgccctgttcgtactctcgggatatctcgacgcgaccgggatcatctcctacggtgacctgttcgccgagatgtcccgctacttccgcagcagaaccgactcggaggtgtgccagttcttcattcagtcgacgaaggacctggccaactacgacctgctgaacaccggtaagaccgcgcacctgatcctcagctcgcatcgcgaggagttcgaccggttgctggccgacttcgtcgccgcccaggactggtgggccgacccgatggcacgccaggcgttcgaaatggacctcctcacacgggcctacatctaccgtgaaccggtgcgtacgccggaccacgagttcaccgagatcgtcctgcgcggccagccggattcacggggcttcctggtcgaggtgtccgcggagctgttccgcctgctggtggcacgggagatgctcgaggccgtcgacgaggagtcggagcggatcaccctgcacatcgaccaccgcggcaggcagaagatgccgtaccagccgcagcggagcctggagcacaacgcgaactactgccagggcatggtgctgcggtcccgggagatcctgcccaccattcaggtcgcctcgacagaggttcccgcctccgtcgcgtgagctacggcgccggggcgaggccggataccccctgcggggcggtgacaccggccgtcgtcccggtgccttcttcagcgcaacacctcaggaccagtcgtacacgcacctgtggcggccgtacatcctcggtgcgatcgaaatgcgcgatgcgtgccacgcaccgcgaatggaccatgcccgcacccgtggcggaatagccggacctcgatcagcgggcaccccacaccgcgcgagagaggagaaaaagcaatgattccgctgtcattcgcacaacgccgtatgtggattctgcaccagatggagggaggggcggagacctggaacatgccggcggccttccggctgaccggatccctggaccaggccgccctcaccgcggcgatccgtgacgtggtcgaccggcacgagatcctgcgcaccgtctacgtgacgaacgacgacggtgagctgtaccagcggatcctcccgacagcggaggccacgcctgaggtgccggtcatcgaggtggcccccgaggacgtgtccggcgccgtcgaggaggccatgacgtacaggttcgacctggcggttatgtcctcggttccatcgtggtgcgtgacgtgcacgcccggcaccacgaaatgagcatgcccgaacccgtggccgaggtcatggaggtcatcaaccgcatgctggcggagccggcggaatgaccggacagtgatctccggggccgtggacacagcgcgagagacgggcgacgggactcccggacaaggagttcctcgcccggatcgagctcggtcctcgacgtgatcgaggctgtcgtccgtgcaccgcttgcaccgctctgaccaagggcgatgcgcgggaacacccgtgtcagcggtcgtgtcaggagtcatgacagagcggtgacagacgggtgacagacctggccgcgactgtggaggcatgagaagtacagcgattgcagtttcagggctgcggaaggcatacggagacaagaccgtgctcgacggcatcgatttcgatgtcgccgaagggtcgatcttctccctgctcggcccgaacggggcgggcaagacgacgacggtgaacgtcctggcgacgttgctgaaggccgacgccgggacggtgcacgtcgccgggcacgacgtggcgaccgcgaccaagcaggtgcgcgccgccatcggcgtgaccggtcagttcgccgcagtggacgagctgctctcgggccgggagaacctccagatgatggcggacctgaagcgcgtgcgctccggcgaggtcgtcacgcggctgctggagcggttcgacctggtggagtcggcggacaagatggcgtcgacctactccggcggtatgcgccggaagctggacctggcgatgacgctggtcggcaacccgcggatcatcttcctggacgagccgacgacgggtctcgacccgcgcagcaggcgcacgatgtgggggatcgtccgcgagttggtggccgacggcaccaccatcttcctcaccacccagtacctggacgaggccgacgagctcgccgaccagatcgcggtgctgagcgatggcaagctcgtcgccgaggggagcgccgaggagctgaagcggctcatccccggcgggcacgtgcggctgcgcttcaccgaccaggccgcgtaccggtcggccgcctccgcgctgcgcgacgtcaccacggacgacgacacgctgtcggtgcagatcccgagcgacggcacccagcgcgagctgcgctccatcctcgactggctggactcggtcggtatcgaggcggacgagctgaccgtgcacactcccgacctcgacgacgtcttcctcaccttgaccgagcgcacgagcaaggaggcgatctcgcagtgagcgctgtctcgacggcactggccgactcggcgatcatgctgcgtcgcaacctgaagcacaccatgcggaaccccgtcacggtgttcaacgcgatcctgttcccgatcgtgatcatgctcatgttcgtcaaggtgttcggcggcgccttcagcgtcggtcagcactacatcgactacgcgacgccgggcatgctcgtgatggccgtcagctacggcctcggggccaccgcgacgtccgtgaactccgacatgaccaagggcatcatcaaccggttcaagaccatggacgtctcccgcggagccatgctgaccggacacgtcgtcgtcaccacggtgcgctgcctggtggccgccgcggccatcatcggggtggccttcgcgatgggattcgacccccacgcgagcgccctcgactggctcggcgtgctcggtctcttcctgctcctcgccgtcggggccagctggctcaccgtcgccatgggcctgggcgcgaagagcgcggagtcggcgggcctggccgccgtgccgctgatcatgctgccgttcctgagcagcgcgttcgtgcccgcggacacgatgggggcaggggtgcggcagttcgcggagtaccagcccttcaccccgatcatcgagacactgcgcgggctgctgtcgggccaccacgcgtcgaccggccacacggtgtcggctcttgcctggtgcatcgggttggcgatcgtcgggtacctgtgggcggtctccacgttcaagaagcgagcgtgacctcgaccagctgagaccagctcgtgcgtgtcccctcccgtgccgcctcgacgaaccccgcgtcgccgaggcggcgccgcgctgtctgctcgatccgggccacgtccgtatgggagcggtccgccagcccgcgcacgctggtgctggccgcgagaagccgcgcggcctgctcgggctggtcgcggcgaagtgccaggtccgcgaccccgacgagcgcccgcgcgatcagcggcgcgtgtcccgcctcggacgccgccgcgcaggccgccgcgcggtacgctcgcgcctcgccgaggtcgtcggcgaggtagccgagcagatcgtgggtcaccgcgcggatgttcgcctgctccgcgtcgtcgcccagcagggccgtcgcggcgccgagttgcctgcgtgcctcctcggggcggccgccccaccgggcgagttccgccttcgacagggccagcacggccagtgcgcccggccaggcgacccgctccgcataccgctgtgcctcggcgatggcggccgcgctggcgtcctcgtcgccgagcagccagtacaactgcgcctgccgtgaccgcatctggatgatgtcctcgatggcaccgacctcggtgacgaccgcgatcgcctgctcgtagtgctcgcacgcggcggtgaactcgccgcgcgcggcgatccggtccgccagctcggtcagggcgaacgagattccgaaccgttcgccgatcgcccggaactcggcgagtgcccgctccaggtgcgcgtccacgtcccgcccgccctggccgagcatgatccgcatcttgcccagatgcagccgggccagcgcacgcgcccaggggtcctcgtcgtcgagcagcggttcgaacgcgggcaggaacgcgtcgggcccctgcagcatgcgtttcagcggggcgatgaaccccatcagcgggtggctgcgccggctgtgccgactgaaccggtacgccttgtcgatccactccgcgacctggtgttcgtcccccggcccggagctcaggaaatgcacgaccagcgcgtacatcacggcccggacctcgtcggccacctcgccgggcatcctgctggccgcggtgatcagttccaggccctcggacctgtgcccgccgagccaccagtaccagcccgcgcccgccgcgagccgcatcgccgcctgcgcctcgcccgccgcgagcgcgccgcgcatcgccgcaccgatgttgtcgtgctcggcctccagcgtggccagccacttcagttgctcggcgcggcgcagatgcggctccgcggtctcggcgagctcggtgaagcaggcgaggtgcgcgtggcgtgccagctccgcttcgcccgcctccgcgagccgctgcccggcgtactccttgatcgtgccgatcatgcggtagcgcggggcactgtcgccctcggcgcgcagcagcgacttctcggtcagcgaggtgagcagctcaagcacctgttcctgctcaaccgcggcgcccgcacagacccgttcggcagcgtccagactcgccccgccggagaacaccgagagccggcgcaggacgagccgctcggcgtcggtgagcagctcccaactccagtcgaccagcgcgcgcagcgtcttgtgccgcggcagcgcggtgcggcttccgctggtcagcaggcggaaccggtcgtcgagccggtgggcgagctggtcgatggacatggtgcgcaaccgggccgcggccagttctatcgccagcggcattccgtcgagagcccggcacacccgcgccatcgtggccagcgtgcgggcgtcggacgcgagatcccggcgcaccgctccggctcggtcccgcagcaaccgcacggcgggtgcggactcgatctcgtccgggctcgcgcccggctccggcagggccagcgggtcggcctgccacagcgcctccccggtgatgccgagcggttcgcggctcgtcgccaggatccgcagccgccggcactctccgagcacccggtgggcgaacaccgccgcggactcgaccacgtgctcgcagttgtccaggatcagcagcgcctcccgctcgcggatcgcggcgatgagccggtccgtcagctccacgttcggggccccgccgagcagggcgtcccgcaggccgagtccggcgagcgtcgcctgcgccacgtcggccacgtcgccgtccgcgccgatggcggccagctccaccagccaggccccgtccggcagatcgccgagcatcgcccgcgcggtctccgcagccagcctggtcttgcccgcgccgcccggcccgatcacggtggtgagccggtgctcggcgatgagttcgcggaccgcggcgacatcggcgcccttgcctatgaagctggtcagctcggcgcgcagattggtcttgcggttccgctcacgcgtccccagctcgccgcgcagcagcgcgacgtgcaacgcggacagctccggcgagggatcgacgcccagcgcgtcggccagggcctccttcgcacgctggtacacaaggagcgcctggctgtcgctaccggccgcgacaagggcgcgcatcagcgcggcgacgagccgttcccgcagcggatgcgcggccaccaggtcggtcagctccgtgaccagctccgcaccgcgcccgagggtgttctccgcgtcgaaccactcctccagggcggtcaggcgcaacccgtcgagccggacgaccgcggcgtcgaacgcggcgctgtcctgcgggccgctgtcctgcatggccgcaccgcgccacagctcgagggcctcgcgcagcagttgcgcccgccgggaggcgttctcggtgcgggcctggctcgcgacgacgaggcgctcgaaccgtacggcgtcgacggcgtcgggttccacgatcaaccggtagccatccgtatgcccctcgaccgctccgtacggcagtgccttccgcagccgggaaaccaagcgctgcagggcattcgtcgcgtcggcgggcgattgctccccccagatccagtcgacgagcgacgccttcgggaccacctgaccgggtctgagcgcgagggcgatcaacagtccgcgcagccgggcgcccggcacgtcgacccatacgccgtcgtccgtgcgcatctcgaatggacccagcatcgcgatctgcacccgccgattttgtcatgggcgcgtttggcgggcagccaactgggtcgaattcgcccttaactcccccagtcctgcacgctgtcgtattctcctggccacgactttacaacaccgcacagcatgttgtcaaagcagagaccgttcgaatgtgaacacagaactaggcggtggcgtacaccgtcgcctcggtcggcccgtagagattggcgatcccgaccgcagcaccaccgagaacgtccccgacgtggccgaccagcccgtcatcgtcaacgcctgatccgcggtgcggacaggccgtgtcgcgaccggccgtgcggaattaagccggcccgtaccctgtgaatagaggtccgctgtgacacaagaatccctgttacttctcgaccgtattgattcggatgattcctacgcgagcctgcggaacgaccaggaattctgggagccgctggcccgccgagccctggaggagctcgggctgccggtgccgccggtgctgcgggtgcctggcgagagcaccaaccccgtactggtcggcgagcccggcccggtgatcaagctgttcggcgagcactggtgcggtccggagagcctcgcgtcggagtcggaggcgtacgcggtcctggcggacgccccggtgccggtgccccgcctcctcggccgcggcgagctgcggcccggcaccggagcctggccgtggccctacctggtgatgagccggatgaccggcaccacctggcggtccgcgatggacggcacgaccgaccggaacgcgctgctcgccctggcccgcgaactcggccgggtgctcggccggctgcacagggtgccgctgaccgggaacaccgtgctcaccccccattccgaggtcttcccggaactgctgcgggaacgccgcgcggcgaccgtcgaggaccaccgcgggtggggctacctctcgccccggctgctggaccgcctggaggactggctgccggacgtggacacgctgctggccggccgcgaaccccggttcgtccacggcgacctgcacgggaccaacatcttcgtggacctggccgcgaccgaggtcaccgggatcgtcgacttcaccgacgtctatgcgggagactcccgctacagcctggtgcaactgcatctcaacgccttccggggcgaccgcgagatcctggccgcgctgctcgacggggcgcagtggaagcggaccgaggacttcgcccgcgaactgctcgccttcaccttcctgcacgacttcgaggtgttcgaggagaccccgctggatctctccggcttcaccgatccggaggaactggcgcagttcctctgggggccgccggacaccgcccccggcgcctgagccccgggccggaggcggccgcgaccacgacgcccgcgggacgtgacgagcggcacgactcgacgactccgggctcctttgacgctgtccgtcgcgccgggtagcgtaggacaccgtgcccgcgccgtcgggccctcgcgcgtgcactcggtcgaccgctccctgccggagtgggtgcgggtgcacggggtggctccccacctcctctcggatcggtcctcgcggactgccgccgtgcggaggaccggggcgacacgcccgggcgcgggggtcggtgcgggactccagacctccggggtagtcgtgcgacgggcgacgatccgggccgagccggccgtcctgggtgacgggtgccggtcagaccagagaacaccgacagacggagacgtaggctggcaatgcagtcagaatcagaagccgcgcctgcgggtgcgtcggagtcgttcgtacaagaggtctcggcgctgtggggggaatacctcgactctcgtgaggtcggagcggacgacgacttctttgagctcggcggcaattcgctgatcggcatcaagatcatcgatcgggtggcccaggactacggcgtcgaactgtccgtgcgcgacttctacctggcgcagaccccggcccgggtcgccgagttgatcgagcggggaagggcgcggacgtgaggttgacgccgggtcccgcgcgcgacatcgacctcgaccgcgtcgacctgttcgacctggacctctacacctcgggtgacccgcatccgatctgggacgcgatgcgggcgaaggctcctttgcatcaccaagtccttccggacgggcgggagttctggtcggtgacccgctacgacgatgtctgccgggtgctcggcgaccaccgggagttcacgtcggagcgcggcacggtacccacccacctggggacggacgacgtcgcggccggcgtgctgctgacgtccaccgacccgccgcggcacaccgaggtccgcaggccgctcggcgccaagctcaccgcgcgggcggtgaagtcctgggaggactcgatccggcggtcgatcgtgcgcttcctcgaaccggcgctcgacggtggcaccttcgacctggccgagaaggcgttgctcctcccggcgatggtcacgggcccgctcctcgggatcccggagaaggactgggaggaactcgtccagctgaccgcgatggtgacggctccctcggaccagcacttccagcagggcagcgaagccgcgaccctggccatcgcccaccacgagctcgtctcctacgtcaaggagtgggtcaagacgcggcgggcggccggaggcgaggacgacagcctgctccaccacctcatgagcgtccgcccgggaggcgcgccgctgaccgacgaggagatcgccctcgacggctacagcattctgctgggcgccaacgtgacgacgccgcacaccgtctcgggtacggtgcaggccctcatcgagcggcccgagcagttcgagaaggcgcaggccgacccgtcgctgatcccgaacctggtcgaggaagggctgcgctggacgtcggccgcttgtaacttcatgcggtacgcggtggacgacgtccagatcggcgcaggcacgatcccggcccgtggggcggtcgtcgcgtggatcgggtcggcgaaccgggacgagtcccagttccccgatccgcatgtcttcgacatcacacgggacggcgcgaagcgccaggtcgccttcgggttcgggtcgcacttctgcatcggggcgccgctggcccggctgaccctgcgcgtcttcttcgaagaactgctccagcgattcggctcggtcgagctcgacggcgaaccgcagcacctgcggtcgtacttcatcgccgggatgacccacctgcccatcgtcgcccagaaacgaaagacgccatgacatccggctccaccaccgccacgtcgccgtggttcgtccggccgccgtccgccgagcaccccgcccggctcttctgcttcccgttctccgggtccggggcctcggccttcagcgcctggccggccgcgatcgacgacgtcgaggtctgcccggtgcagttccccggccgcgagaaccgccttgcccacccccactacggcacctacgagaacctcgccgccgacctggtcgaaatcctggtgccgcggctcgaccggccgttcgcgttcttcgggcactgcgcgggcgcgctgcccgcgttcgagaccgtggtccggctcgccgaactgggcctgccggggccgcagtgcctcttcgtgtcgggccagcccgcaccgcacgacgccgcgagcgaccggatgctcagcatgaccgagcccgagttgcgcgccgagttggagtcgttcctccgtggccgggggatcgaaccgcggccggacatgatcgatctgggcatggtcgtgctgctccgtgatctcgacgccgcgcgtgcttaccgtcggacggagccggtcgcggtgcggtgccccatcgtcgtgctgaactggcaggacgaccccgacgtgagccttgacgagctcgaggggtggcgtcggtactcggattcggtcgacatccgggtggtcgacggcggccactacgacttcatgaacgcgccggacgagctcctgaagcggttgacctcctggcggtgaaaggcggaagccggcctggaaggccgcagtgacaacgaccttcacgaattgatcgaccgcggatagccgtggctacacctgttcttcagagcaattgttgggggaggccctggtgggggacgtcgagaacttccggtcctacgcgcgacgcgccgtcggtgacgagcggacgccgcgcgagggggcgcacgagctggaggagtccgcgcgcgagcccatcgccgtcgtgggtatgtcgtgccgtctgcccaaggcccgcaatcccctcgccttctgggaactgctgcgcgacggcaggagcggcatcaccgacgtgccggccgaccgctgggacgcgcaccggctgctcgcggcggacgtcacggctcccggcaaggtcaccaccacgcgcggcggcttcctggacgacatcgccggtttcgacgccgacttcttcgggatcgccccgaacgaggccgcgatgatggaccctcagcagcgtctgatgctggaactcggctgggaggcgctggaggacgccggcatcgtccccgagcacctcgcggggacccgcacgggcgtcttcgtcggcgccatctgggacgactacgcggtccggctctacaagcacggcacccggcgcatcgaccgccactccgtgaccggactccaccgcagcatcatcgccaaccgcctttcctacacgctcggcctcaacggccccagcctcgccgtcgacgcggcccagtcctcgtcgctggtgtccgtgcacctggccgcggagagcctccgcgccggagagtgcacgctcgcgctcgcgggcggagtcaacctcacgatcgtccccgagagcaccatcggctcgaccaagttcggcggcctgtcaccggacggactgtgcaagaccttcgacgcccgggccaacggctacgtccgcggcgaaggcggcgcctacctggcgctcaagaccctgtcccgggcggtggcggacggcgaccggatctactgcgtgatcgagggcagcgccgtcaacaacgacggcgccacgcccggcctcacggtgcccagcgcacgcgcccaggaggaggtcatccgccgcgcgcacgaccgcgccggaacccgtcccgaggacgtccagtacgtcgagctccacggcaccggcacgcgcgtgggcgaccccatcgaggcggccgccctgggcgccgcactcggcaccgggcgccccgccgacgccccgctgcacgtggggtccgcgaagaccaacgtcggccatctggagggcgcggcgggcatcgtcggcctgctcaagaccatcctcagcatctggcaccgcgagctgccgcccagcctcaacttcgagacacccaaccccgacatcgccttcgacgaactccgcctgcgtgttcagcaggacctcacctcctggccccggcccgaccgcccactgatcgccggcaccagctccttcggcatgggcggtaccaactgtcacgtcgtactgcgtgagtggacggtcgacgactgtgcgtccgtgcaggacggaccggccgtcgtgacggacgggacggtgccgtggctggtgtcggcgaagtcgcgggcggcgctggaggagcaggcgcggcggctccttgaccacctggaccggcacccgcgggaaacgcccgctgaagtcggtcatgcgctggcggtgggccggtcggtgttcgatcaccgggcggtggtggtcggccgtgaaccggccgacttccggggcgcgttgagcgcgctggccgagggggagccttccgcgcaggtggttacgggtgcggtggccgcccgacccggcaagacggtgttcgtcttcccggggcaggggtcgcagtgggtcggtatgggcgtggagctcatggcgtccagccctgtcttcgccgaacacctgaccgcctgtgcggcggcgctggagccgtacaccggctggaacctcatcgacgtcctggcccaggcgcagggtgcccccgcgcttgagggcgacgatgtcatccagcccgcgctgtgggcggtgatgatctccctggcgcggctgtgggagcacctggggatcactccggacgcggtggtggggcactcccagggtgagatcgccgccgcgcacatcgccggcgtgctgtcgctggaggactccgcgcgcatcgtggcgttgcgttcgcaggctctcgtccagatcgcggggcacggcggcatggtttccctgccgctgcctttggccgatgcttcggagctgatcggacggtgggaggggcggctggtcgtcgccacggtcaatgggccgtcggccacggtggtggccggtgatacggacgcggtcgaggaactgcgagctcattgcgagaaggagggcttccgggctcgtcgtgtcccgatcgactacgcctctcacacgtctcacgtgcaccctcttcgcgaccgattgctggatgtcctggcgccgatcgagccgcgagaggcgagcatcgcgttctattccactgtcgccggtcatctgggcgggccgatggccgatgccacggtgatggacgcccggtactggtacgacaatctggccaccgccgtgcacttccaggccgccaccagcgctctgctggacgacgggcacacgctgttcatcgaggccagcccccaccccgtcctcacccaccccctgcaggagaccgtcgaggatcacgcgagcggtggcgaggtcgtcgtcaccggcaccctgcgccgggacgacggcacctggcagcgcgtgctgacctccctcgccaccgtccacacccacaccatcgcccccgtcgactggtcgggcttcttccccgccacccggcccacccacctcgacctgcccacctaccccttccaacggcgacgtcactggatcgacctgccgacggacggcgttgccgacgccgattccgacgcgtccgtcgatgtggtcgccgacgtggtcgccgaccggcccgaggacacggctccccctgccgagtccggcgcgtcgtcgccgctcctcgaccgcctcaggaaggcttcccggacccagcgggaacagatcctcaccgaccggatccgtgccgaggtcgcggccatcaccggacgtgtcacctcggagacggtggacggcgaccgcacgttcaaggacttcggtttcgactccttcgcctccgtcgaactgcggaaccgcctgagtgccctcaccggcctgaagttgccgacgacgctgctcttcaaccacccgacccccaccgccgtcgcccgctatctccggaccgaactcctgggctccgaggagtccggcagcatcgcccacggctccccgctcgccgccgccagcgcggacgaaccgatcgcgatcgtgggcatggcctgccgttatccaggagacgtccgcgcccccgaggacctttggcgcctcgtcagcgagggcgtcgacgccatcaccgacttccccgccgaccgcggctgggacaccgagaagctcctcgatcccgacccggaccgacccggtacgtcgtatgtcaccaagggcggattcctgtccgaagcggcggcgttcgaccccgcgttcttcgggatcggcccgcgcgaggcgacggcgatggacccgcagcagcggctgctcctggagacctcctgggaggcgatcgagcaggcgggcatcgacccggccgcgctgcgcggcagccagaccggcgtgttcgtcggcgccatgacccaggagtacggcccccacctgcacgacggcgtcgccgggttcgacgggtacctcttgacgggcaacaccgcgagcgtcgcctcgggccgcatctcgtacaccctcggtctgcagggcccggccgtgacggtggacaccgcctgctcctcctcgttggtctcgatgcacatggcggcccaggcgctgcgcaacggcgagtgctcgctggccctggcgggcggcgtcgccgtcatggccacgccgggcatgttcgtggagttcagccggcagcgcgggcttgcggcggacgggcggtgcaaggcgttcgccgaggcggcggacggcacggcctgggcggagggcgtgggcctgctgctgctggaacgcctctccgacgcgcggaggaacggccatcaggtgctggcggtcgtacgcggctcggcgatcaaccaggacggcgcgagcaacggcctgaccgcccccaacgggccctcgcaggagcgcgtgatacgccaggccctggccggcgcgggcctgtcggcgcaagaggtcgacgtcgtcgaggcccacgggaccgggaccgccctcggcgacccgatcgaggcgcaggcgctgatcgccacctacggcaaggaccggcccgaggaccggccgctgtggctgggctcgctgaagtcgaacatcggccactcccaggccgcggcgggcgtgggcggcgtcatcaagatggtcatggccatgcgtcacggcgtcctgccccagaccctccatgtggaccagccgtcctcgcacgtggactgggccgaaggagcggtggaactcctcaccgagaaccggacctggccggagagcgaccacccgcgacgggccgccatttcgtcgttcggtatcagcggcaccaacgcccatctcatcgtcgagcaggctccggagggcgagggtgccgccggtgagggtgtgccggagccggtggtggtgacggacgggacggtgccgtggctggtgtcggcgaagtcgcgggcggcgctggaggagcaggcgcggcggctgctggaccatctggatcgtcacccggaggcgacgcccgtcgagatcggtcacgcgctggcggcgagccgctccgtgttcgatcaccgggcggtgctggtcggccgtgaaccggatgatttccggggtgcgttgacggcgctggccgctggtgagccctcggcccgagtggtcgccggtacggctgcggcgcagccgggcaggacggtcttcgtctttcccgggcagggctcgcagtgggccggtatgggtgtggagctgatgcggacctcgccggtgttcgccgagcacctgaccgcctgcgcggcggcactggagccgcacaccggctggaacctggttgatgttctggcccaggagcagggcgctcccgcccttgagggcgatgcggtcatccagcccgctctgtgggcggtgatgatttccctggcgcggttgtgggagcacctggggatcactccggatgcggtggtgggtcattcgcagggtgagatcgccgccgcgcacatcgccggtgtgctgtcgttggaggactccgcgcgcatcgtggcgttgcgttcgcaggctctggttcagatcgcgggccgcagtggcatggtgtctttgcctctcccttcggccggtgcctccgagctgatcggccggtgggaggggcggttggtcgtggccacggtcaacgggccgtcggccaccgtggtcgccggtgacatcgccgcggtcgaggagctgctggctcactgtgagagcgagggtcttcgggcccggcgtgtcccgatcgactacgcctctcacacgtcgcatgtgcacccgctgcgtgagcagttgctggacaccctcgcttctgtcgaggcgcgcgcggccactgtcgcgttctattccacggtggccggtcatctgggcgggccgatggccgatacgacggtgatggacgccgagtactggtacgacaatctggccaccgccgtgcacttccaggccgccaccagcgcgctgctggacgacgggcacacgctgttcatcgaggtcagtccccaccccgtcctcacccaccccctccaggaaaccgcggaagaccacccgacgggcgagcggaccctggtcaccggcaccctgcgccgcgacgacggcacctggcagcgcgtgctgaccgcgctcgccaccgcccacacccacaccaccacccccgtcggctggtcggacttcttccccgccacccggcccacccacctcgacctgcccacctaccccttccagcaccagcgttactggctggagcggcccgagagcgcgggggacgcggccgcggccggacaggtgggggtcgaacacccgctgctcggtgcggcggtggagctggcgggcacggatgtcaccgtgctgaccggtcggttgtcgttgcagacgcacggctggctggccgaccacacgatctccggcaccgttctgctgcccggcacggccttcgtcgagatggcgctccgcgcgggtgacgaggtgggcgttgaccaccttgaggaactcgccctgcaggcaccgctcgtcctgccggcgaccggtggcgtccagctgcgcgtggaggccggtgagctcgacgacaccggacggcgttccgtgagcgtgtactcccggcccgacggccaggggacaggtgtgccctggacctgccatgccaccggcgtgctcgccaccagtggcccggcgccgtcctcatgggatccccgggtgtggccgccggccggggcggtgccggtggagaccgatgagctgtacccgtcactggccgtcctcggctatcagtacggccccgcattccagggggtgcggacggtgtggaagcggggcgacgaggtgtacgccgaggtggtgctgccgcaggagcggcacgccgaagtggccgccttcggcatccatcccgcgctgctggacgcggccctgcacgccgggctcgtcccggacccggtggccgggtgggaaccggagccgccgaggctgccgttcgtgtggtccgacgtgcggctgcacgcgaccgacgccacgaacgtgcgggtgcggctggccccggcgggccacgacgccctcgtgctggaggtcgccgacaccgagggcgcgcctgtcgcgtcggtcggttccttgatgatgcgtcccgctgaccccgcgaagctgggcggggcccgggacgggcaccacgacgcgctgttccgcatggaatgggtgagccgggcggtgcgggttgccgacgggaccccggtcggcccgtgggcgctggtgggcgacgacggactggggctcggcaccgttctggacgccgcacagatgcgtcgctacgcagacctgaccgcgctcaccggcgagttcgaggaactcgccaccaccgactccgcagacactttcgacgactcccggcccgaactcgtcctgttctgccacctgcccggggaaggcgccgcctccggcgatcctgccgccgcccgcgtcgagctgttcaaggcgctgtccctggtgcggtcgtggctcgccgacgagcggttcgccggcacacggctggcggtggtcacccgtggcgcggtggcggccgacgacgcggagcagccggacctcgcctccgcaccggtgtggggcctgctgcgcaccgcgcagacggagaacccggaccgtttcgtcctcgtcgacgtcgatgaggacgagcgttccctccgcgccctgcccgccgcgctcgcctgcggtgagccgcagttcgcggtgcgcgggggagaggtcctggtgcctcggctcgtccgggccgggtccgcggccgacggcgcgccgacacctccgcgggagcgggcggtggggcggccggacgcgaccatgccgtccgtgtgggatccggagggcacggtgctgatcaccggcggcaccggcacgctgggcgggcgcttcgcccggcacctggtgaccgagtacggggtgcggcggctgctgctggtcagccggcgggggcccggcgcggagggcgccgccgagctggtggagcggctggccgggctcggggcgacggccacggcggtggcgtgcgacgtctccgaccccgaggcgctgtccggcctgctggaggcgataccggccgagcacccgctgaccgcggtcgtgcacacggcgggtgtgctggacgacggcctggtctccgcgctgacgcccgagcggatggacgcggtgctgcggcccaaggcggacgcggcatggcacctgcaccggctcacccagggccgggacctgagggcgttcgtcctgttctcctcggtgatgggcgcgctcggcggcgcggggcagggcaactacgcggcggcgaatgtctacctcgacgcgctggccgcactccgccgggcccagggacttcccgccacgtcgctggcctggggcttctgggacgaacgcagcgagctgacgggggatctggaccaggcggacctggcccggatggcccgcgcgggcctggtgcccctgcggtcggacgaggggctcgccctgttcgacacggccctcgccctgggcgagcccacgctcgttcccgcacgcctggacaccacgcggctcgctaaggacgggaacgggccgctgcccgcggtactcggcgccctggtgcgtccccgtgccgcccggcgtaccgccgcggccggttcggcgggcggcgccacgggcggacagcggttcgccgggatgtccgcggccgacgcggagcgcgagctcatggaggcggtgcgcgcccacaccgcgaccgtgctggggcacgcgacgccggaggcggtccggccggacagcaggttcaaggacatcggcttcgactcgctgtcgtcggtggagctgcgcaaccgcctgagcgcggccttcggcctgcgcctgccggcgacagcggtcttcgaccatccgacgcccgccacgatggcccgccacctgcgcggcgaactgctcggcgaggcgacgcccgccgccgcacccgtggtcacggccgccgcgctggacgagcccgtggccatcgtgggcatgggatgccggcttcccggcggcgtcacctcccccgaggagctgtgggagctggtcgcgtccggcagccacgggatctcggggctgccgaccgaccgcggctgggacgtcgacgggctctacgaccccgaccccgaccggcggggcaagagctatgtccgtgaggcgggcttcctctacgacgcgggcgagttcgacgccgacttcttcggtatcgcgccccgcgaggcgctggccatggacccgcagcagcggctgctcctggagaccacctgggaggcgttcgagcgtgcgggcatccgcccggagtcggtgcacggcagccggacgggcgtgttcgtgggcgccatgccccaggagtacggccctcacctgcacgatgccaccgagggactggacggcctgctgctgaccggcaatacgaccagtgtgctctccggccgcctcgcctacttcctcggtcttgagggcccggccctcaccatcgacacggcgtgttcgtcgtccctggtggcgctgcaccaggcggcgcatgcgctgcgccagggggagtgcaccctcgcggtggccggcggcgtggccgtgatggccactccgggagtgctcaccgagttcagcaggcagcgcgctctcgcgcccgacggccggatcaagtcgttcgcggcctccgccgacggcacgggctggagtgagggcgtcggaatcctcctcctggagcggctctccgacgcgcggaagaacggccatcaggtgctggcggtcgtgcgcggctcggcggtcaaccaggacggcgcgagcaacggcctgaccgcccccaacgggccttcccaggagcgcgtcatccgccaggccctggccaacgcccggctcaccccggacgaggtcgacgtggtcgaggcgcacggcacgggtaccaagctgggtgacccgatcgaggcgcaggcgctgatcgccacctacggtcagaaccggcccgaggaccggccgctgtggctgggttcgctgaagtcgaacatcggccacagcatggcggccgccggcgtctccggtgtgatcaagatggtgatggccctgcggcacggggtactgccccgcacactgaacgtggacgagccgaccccgcacgtcgactggcccgcgggcgcggtggagctgctcaccgaggagcggtcctggccggacccgggacgcccgcgccgcgcggcggtctcctccttcggtatcagcggcaccaacgcccatctcatcgtcgagcaggctccggaggacaccggcgtcacccgtgagggtgtgccggagccggaggtggtcacggacgggacggtgccgtggctggtgtcggcgaagtcggaagccgcgctggcagagcaggcgcgacgtctcctcgaccacctcgaccgtcaccctggggtgacccccgccgaggtcggccacacgctggcggccagccgttcggtgttcgatcaccgggcggtgttgatcggccgtgaactggccgaccaccgaggcgcgttgaccgcgctggccgctggtgagccctccgcccgggtggtcaccggcacggtggcggcgcagccgggcaggacggtcttcgtctttcccgggcagggctcgcagtgggccggtatgggtgtggagctgatgcgcacctcgccggtgttcgcggagcacctcacggcgtgcgcggcggcgcttgagccgcacaccggctggagtctcatcgacgtcctcgaccagacgcagggcgccccagatctcgaccgcgtcgacgtcatccagcctgcgctgtgggccatgatgatctccttggcccggctgtgggagcacctgggcatcaccccggacgccgtagtgggccactcccagggtgagatcgccgcggcgcacatcgccggtgtgctgtcgctggaggactccgctcgcatcgtggccttgcgctcccgggccatcacccacatcgcgggcgacggcgggatggtctccctgccccttgccgtggcggacgccgaggaactcatcgcccggtgggaggagcgggtggtcgtggccgcggtcaacgggccgtcggccaccgtggttgccggtgacgccgacgcgctggcggagatcgtcacccactgcgagggcgaggacatccgggcccggaagatcccggtggactacgcctcccactccccgcacgtcgaggcgctccacgacgaactgctggagctgctggctccggtgcgcccgcgggaggcggaggtggcgttctactcgacggtgggcgaccacgccaagggcgcgatgagcgacacgacggcgatgggtgcggcgtactggtacgagaacctgcgcaccaccgtggccttcgaggcggccgcccgcgccctgctggacgacgggcacaccctgttcgtcgaggtcagcccccacccggtactcacccaccccctccaggagaccgtcgaggaccacacgggcgccggcgaggtcgccgtcaccggcaccctgcgccgcgacgacgacacctggcagcgcgtgctgaccgcgctcgccaccgcccacacccacaccaccgcccccgtcgactggtcgggcttcttccccgccacccggcccacccacctcgacctgcccacctaccccttccagcaccagcactactggatccagcagaccaccaccgcgaccgatccccacaccctcggcctgcacgccgccgaccacggcctgctcggtgccgccgtcgccctcgcggacggcgacggacacgtgttcacagggcacctgtcgctgcgcagccatccctggctggccgaccacgccgtccacgacacgtccctcctgcccggcaccgcgttcgtcgaactggccctccacgccggtcaggccaccgacaccccccacctggaagacctcaccctcgaagcccccctcaccctcccggccaccggcggcctccacctgcaggtgcacgtggccgcatccgacggcgacggccaccgggccctcaccatccactcccgacccgacgacgccacccccgacctgccctggacccgccacgccaacggcactctcgccccccagccgtccggcgcgccggacccggccgagtgggcggaactcgcggcctggccgccggccggcgccactcccgtgcccgccggcactctctacgaccatctcgccgaccgcggctaccgctacggcaccaccttccagggcctgaccgccgtctggcgccagggcggcgccctctacgccgaagtcaccctctccgacgacaccgacaacgccaccgccgccgaccactacggcatccaccccgcgctcttcgacgccgcgctccacccgatcgtcggcgccggccccgagcaggactcggaccaggtgctgctgccgttcgcctggtcgaacgtccagctgcacgccgtgggcgcccgggccctgcgcgtccagatcagccctgctgacgcggggacgctgcgcgtcaggctcgccgatcccaccgggcagccggtcgccgaagcggcatcgctggccctgcggcccatcaccaccgagcagttggcgaaggccgttgcggcgggaggagacgaccacctgttccgcctggcctggacccccgcgtccgtcacggaggagctcaagaccggccgtgtggcgttcctgggagccgccgttcccgaggcactggtcacatcgctgcccggcgatgtcgcggtcgagcgccacgagaagctggcaccgctgctggcggacgacaccgctctcctcccggacctggtcatcgcgactggcctgctggagcgttcccactcgggcgaggacgtccccggccccgcgcgcgaggccgtccagtacgccttggacctggtccaggagtggttggccgaggagcggctggccggcagccggctcgtgttcgtcaccaggcgagccgtcgcggtccatgccgacaccgagtcgcccagccccgcggacgccgctgtctggggcctgatccgtacggctgaggccgagaatccgggccgcttcaccctgatcgacctggcggacgagaaggccatcgcatccgagtcgttccgcgcggcgttgggaagcggcgaaccgcaggtggccgtgcgtgacggcgatcagcggctgtacgtcccccggctcgtacgggaggtgcagcccgacgacaccgccgtaccggagcccgccgcgggcggcacggtgctgatcaccggcggcacgggcaccctcggcacactgttcgcccgccattacgcgacggctcggcaggccggccatctgctgttgaccagccgacgcggcccggacgctccgggcgcgcgcgaactcgccgccgaactgaccgaactgggtgtgaaggtgaccgtcgtcgcctgcgacaccgccgaccgcggcgccctcgccgcgctcctcgcggccgtccccgacgaacaccccctcaccgccgtcgtgcacaccgccggcgtcctcgacgacggcaccatcacctccctgacggcggaacgcgtcgagcgcgtcttccgcccgaaggtcgacgccgcctggcacctgcacgagctcacccgcgagagcgacctcaccgagttcgtcctcttctcctccgcggcgggcgttctgggcacgccgggccagggcaactacgccgcggcgaacgtcttcctcgacgcgctggccgaacgccgtcgcgccgacgggctgcccgccacctccctggcctggggactgtggtccgacagcagcggcatgaccggccacctggacgacgtggacctgacccggatggctcgcctcgggatcaagcccatcacggcggaggaaggggtggcgttgttcgaggcggcccgtgccacgggcgccgcctgcctggtccccgccaagatcgccccagccctgctccgtccccacttggagaccggcactcttcccgccgtcctccagggcctggtgcgcgctcccgtccgcaaggccaccgtggccacggcgaccgacggcgccaccctccgcgatcgcctggcccacctgtcaccagaggaggccgaggacaccctcgccaccctcgtccgcacccacgtcgccctcgtcctgggccacgacacgtccgacaccatcagtctcgacaaggcgttcaaggacctcggtttcgactcgctgaccgcggtcgagctgcgcaaccgtctggcgtcctcgaccggactgagcctggcagccaccctcgtcttcagctacccgaccccacgtgaactggggcggcacctgcacgacctgctgcgtccggcagcggacaccggctcggccgaggacgcggggatccgggaagtgctgcggaccgtcccgatcgaaaggctgcggagcgcgggcatcttggagctggtcctggcgtgcgccgacccgtctcagccgaacgccgacggccaggcggcggacacggacaccggcgcggacgagctggcggacttggacctggacgcactcgtcgaccttgttctggatgagaagggtgagtgacatgaccaactccgcggatcgcacagcggacggcgcggaccgggtccaacgggcgctccgcacgctgctggaggagcgcgaccgcctccgccaggagaacgacgccctgaaagccgggcgcggcgagccgatcgccgtggtggccatggcctgccgctacccggggggcgtgtcatcgcccgaggagctgtggaatgtcgtccgcgacggcctggacgtagtgggcgagttcccgcaggaccgcgggtggcgggacatcttcgacccggatcccgacacgctcggcagctcgtacacgcggcacggagggttcctgacggacgcggccgccttcgacgcggggttcttcggcatcagtccgcgtgaggcgctggcggtcgatccgcagcagcgcttgctgcttgagacgtcatgggaggtcttcgagcgggcgggcatcgtgcccgccgatgtgcgcggggccgacgtcggggtcttctccggcgtgagctccgccgagtacgggacgcgtttcgtggaggcgagcgggcacgacctggagggctacctgctgcaaggcagcgtgctgagcatcgcctccggccgagtggcctacgaattcggcctgaccggaccggcggtgagcgtggacacggcgtgctcgtcttcgctggtggccgtgcacctggcgatgcagtcactgcgctcgggggagagctcgctcgcgctcgcgggtggggcggcggtgatggcgacgcccgcgctcttcgtggagttctcccggcagcgcggtctgtccgccgacggccggtgcaggtccttcgcggacgcggccgacgggaccggctgggccgagggcgtgggggtgctgctcctggagcggctgtccgacgcccgccgcaacggccacccggtgctggccgtcctgcgcggttccgcggtgaaccaggacggggccagcaacgggctgaccgctcccaacggccgtgcccaggagaaggtgatccgcaaggctctggcgaacgcgggggtctcggccgccgaggtggacctgctcgaagcccacggcaccggaaccacgctgggggatcccatcgaggcaggcgctctgctggcgacctacggacagggacgggccgagggcaggccgctccggttggggtcgctgaagtcgaacatcggtcactccatggccgccgccggggtcggcggggtgatcaaggccgtgatggccatgcgccaccggtacctgccgaagaccctgcacgtggatcagccctcacgccacgtggactggtcatccggtgcgctcgaactgctgctggaggggcgtgagtggacccgggcgggcggcccgcggcgggccgcggtgtcgtcgttcggcgtcagcggcaccaacgcacacgtcatcctggaagaggccccgcggcaggaacaggcggacgagggcgatccggactcgggcgtcgtcggcggcctcgtgccgtgggcgctgtccggcaagagcgcggcggccgtgcaacagcaggcgcgtaagctgcgcgaattcgccgtcgccgacccgggtctcgatgtcgccgatgtcggctggtcgttgacgtcgagccggacccggttcgggcaccgcgcggtggtcctgggacacgaccgggacgagctgttgagcggcctgacggcgctcgctgccggcgaggagtccgccgcggtggtgcgcggcacggcccgggagctcggcggtacggtcttcatgttcccgggacagggttcgcagtgggtcggtatgggccgtcagttgtacgacaccttccccgtcttcgcgcagagcctcgacgcgtgcgcggccgccttggccgagtgggtcgactggtcgctgctcgacgtggtgcgcggcgtggagggggcaccgacgctggaccgggtggacgtggtgcagccggcgttgttctccgtgatggtgtccatggccgccctgtggcggtcctggggtgtggaaccggccgcggtcgtggggcacagccagggcgagatagccgcagcccacgtctgcggcgccctgtcactgcgcgacgccgccaaagtcgtggcgctccgcagcaaggctctggtggatctgatcggtcacggcgggatggcgtcggtcgcggagtccgcggatgtcgtggcggaacgtctcgctccgtggagcgaccgagtgagcatcgccgtcgtcaacggaccccgctcggtggtggtgtccggggaacccgacgccctcgacgaattcgtcgagaagatgaaggccgaaggcgctcaggcccggcgaataaaggtcgactacgcgtcccattcacatcacgtggcccgggtccgtgaccaggtgctcggcccgctgtccgacatgagcccgaagacgtcgacgctgcccttctactcgaccctgtacggcgaggtcatcgacaccgcgcagctgaacggcgactactggtataccaacctgcgcgagaaagtcgtcttcgaaacgtccgtccgacggctggccgacgacggtttccgggtgttcatcgagatgagtccgcaccccgtgctgaccgtcccggtgcaggagatcgtcgaggacgtggacgacgcggtggtcctgtcgtcgtcgcggcgggatcgcggggaggtggaggccgtgctcggctcgctggccgggctccacgtccagggcgggtccgtggactgggacgttctgttcgggacgcgtcgacgggtggatcttccgacgtacgcgttccagcggcagcgctactggctgaactccgtgcacacgggggtgacggcggaggtgtccgcgctggagccgcccgcggctgacgacgatcccgtcgccctgccggacctgatcgccgacctctccgacgacgaggcgacggcacttgtccttgaccacgtcctcacgaaggtcgccgtcgtgctcggacacccctccagcgaggccgtcgaccccgaccaggaattcaaggacatcggattcgactcgctgctctcggtgcagctgagcaagggcctggccacgacgaccggactcaagctgaggccgaacctggtgctgcggcacccgacaccgaggcgggtcgccgggtacctcaagacctcgatggccggtcgcgaccggcggtgaacccacggtgtacggggcgcctgggccccgcacaccgcccagccgacggaccgcgagtccgccggcgaccaggctcgttccggctttcctgagaggatgatctctgtgcgttcgttcggtgcgtcgtctgcgcacaaagggttgtggcgggcgcaggaaatgttccccgacacactgaaccatgcgctcaccctgtggaacgtggacggtgagctggacgcggccgtcatggaatccgcgttcctgcatgtgatgggcgaggcggaagtgctgcgcgtcaccttcgtcgacgacggcgacgggctgcgcctcgtgcccagggaactgggcgactggcggccgttcttcctggacaccggcgccgaggacgatccggagcaggcggcgcgcgaagcgctggccgacatggtgcggcagccgttcgacctggagcgggacctgctgttccggctgggcgtggtcagactcgcggcggcccgctccgtgctggtgatcatctaccaccacctcatatcggacgggttcggcgcggccggcctgctgtcgcggcgcctggccgaggtgtacacggcgctgtcgcggggtgcggacgtaccggagctgccgcacccgtgggatgccgagtcgttcgcgaccgaggcggcgcagtacagcgcctccgagcagttcgccgaggacacggagttctggcgcgactacctggcggacgcgcccgcccccgcccggattccgcgtgtcgccctgtccgacgcgatgcggtccgcgctctccgaaccgatgggcagcgccgaccgctggggggagttgaccgagcccatcggcatggtgagccgcacgctgaccgttccgcacgccgatgcgcaggcgtggaccgaggccgcgaagtccatgggcgtgtggatgtcgtcgatgctgaccgcggccgcggccgtgttcctccggcaccgctgcgaccgtccggagttcctcctctcgctggccgtggccaatcgggtcggggcggcgagcaggacgcccggtctggcggtgaacgtggtgccggtgcgggtgaaggttccgctcggtgcgaccttcaccgagatcgccgacgcgatcggcgacgagacgtacgagatcttcgatcacgcggcctgccactactcggaaatccagcgcgcgagcggaaccgtcctcaacgatcgcggcagtttcggcgccgtcgtcaacgtcgtcgagttcgcggaacgcctccgcttcgccgacagcccggcgcacttcctcggcgggacgaccgggaccttcgaagaactcgcgatcggcgtctacaccgacggaaccgccgacagcgacctgttcatccggctcgacgcccccgcgagcctgtactcccgcgcggagctccgtttcatcggcgaggacctgatcgcgcacatccgcgccgtggtggccgccgacgaacaaccggtcggcgcgctggacgtggtgagcggtgccgagcgggaccgggtgctcacggcgccgaacgacacgaatgtgccggtgccggggctgagggttccggagctgttcgcccgccaggtggaccgggctcccgacgccgtcgcggtggtgtccggggactcggcggtctcgtaccgggaactggacgagcgctccagccgcctggccggggcactgcgacagcggcaggtcggacccgagacggtcgtggcggtggcgctgccccgatcggtcgacctggtcgtcgctctgctgggtgtggtgaaggcgggcggagcctacctgccggtcgacccgacgttcccggcggcgcggatcgcgccggtggcccgcgacgcctcggtgcgcgcgttgctcaccgatatggcgacagccgaagcgctctccggcgatctggatgtgccggcgatcctgttcgacgacatccgcccggacaccgccgccgacagcgacgctgcgacggaggttccgctcccgtcgcgtcaggacggcctgctggccgtgatgtacggctccggaccgaccggtgcggccacaggagtcgccgtgacgcaccggaacatggagcggttcgccctggaccgccgctggcgggaaggcggccgagacaccgtgctgtggcatgcgccgcacacctccgacgcgcttcccctcgaagtgtgggtgcctttgctgaacggcggccgcgtggtcgtggcccctccgggggagctggacatcgacgcgctgaccgaggtgcgagcggcgcacgagatctccacggtgtggctgcccgcgggcctgttctcggcgatcgcggcagaacgccccgagcgtctggccgggttgcgcgaggtgtggaccggtggtgagcgtgtgtccgcggccgcggtgcgacgggtgcgggaggcctgccccgagctgacggtcgtcaccggccacggcccgacggaaacaaccgtgttcgccgcgtcccaccgcatggccgcggacgaaccggtgcaccacgcgggcgcggtcggccgcccgatggaccacacggccctctacgtgctggggccggggctggcgccggtccccgtgggcgtggccggagagctgtacgtggccgggcccggcgtgacgcgtggctgccccgggcgacccgggccgaccgcggagcggttcgtaccctgcccgttcggtccggccggcgcgcgcatgtaccggaccggagaccgggtgcggtggagtaccgacggcctcctcgagtacgtgggccgggccggcgcccgggccgacgtacgtggtacccgggtcgaactggccgaggtcgaggaagcgctgtccgaacacaccagccttgcacggtcggtggtggtcgtcagcgaggacacctccgggcagcagcgccttgtggcctatgtggttccggtgggcggccggaccgttgcgggtgacgaactgcgccggttcgccgcggggcggctgccggagttcatggtcccgtcggtgttcgtggtgatggaacgcctgccgctgaccgccggcggaagggtggaccggtattcgctgccggagcccacgttcgatgacgacaagtaccgggcaccgcgcgaccacaccgagcgggtgctggccgaggcgttcgccgacgtgctcgagctggaccgggtggggatcgacgacgacttcttcgaccacggcggcaactcgctgcgggcgatcagactgaccggcctgatccgggcggagctgaaccaagaggtgcccatccgcacgttgttcgcggcgcgcaccatcgccgggctgtccgactcgtggaaggagctcgcccggtccagcaggccgactctgcgcaggaggacgaaggaaggcgaagctctgtaggtgttccgccgtcatcttcggcagaggcgagatccataccgccagacaccccggtcgacctggccgaccggggtgtcgctccgctgcggcccaccctccgcgcacacgaacacaccgagccgggcccctggccggctccgcgacccccgcccgggcggcaaggtgtcggccccggagagggaacctagcggactgccttccgggcggcggagaggtctcggacggtggcggagatgatgtcgttgacctcctgaccgtgctcgtcgaggtagaagtggccgccctggaagacgtgcagggagaactcgcccgtggtgtgctcccgccaggcatcggcctcggcggtcgtggtgtgcggatcgtcggtgccgaccagcatggtgacggggcagtcgagccgcacaccgatgacccgggggtgggtctcgatggccgtgtaatcgccacggacggcgaagacgatggacgccctcagatgcttgttctccaggtagacggggtcggtgccgccgacggaacgcagttcgtcgatgatgccgtcgtcgtcacggcggtgaaccgttccaccgcgcagcagggagggcggggggtagccggaggcgagcagccaggcgggcggagcgccggtgtcgtcctggtagcggcgggccacctcgaaggcgaggacggagcccatgctgtggccgaagaagacggtgggccggccgtcctcggagcgacgaagtgccgcgtaggtgaggtcggcgagttcggcgaagttctcgacgcagccctcggcacgccggtcctgccgacccgggtactgaacggcgagcacgtccaattccggtgagagagcttccgacagtgcgtagaagtagctcgcagaacccccggcgtgcgggaagcagacgattctgaattcgctgtcgtcggcgggatggaagcggtgtatccactccccgtcgaatttccctgaccctgtcatgcacgacctttctgtgtgtttaccgaatacggcccgcggtgcgggagcggtccgagcgtagcggagctgttcggaaaggaaccggcaacccgaacaacctcttctccatggggagcacaccgggttgtccggggcggaactcgatgagcgcatcgaattccggcgggccccggtgggttcaggcgggccggtggtccaggagggatgccacgaggctggtgtcgacgttgccgcccgagaccagtacgccgatgtcccgcgcctggccgtcggcggccaggcgcagggcgccggccacggcggtggcggcggcgggctcgatgagcagacgggcgtgcacgaggaccaggcgcagcgcctgggcgatggcgctctcctcgatggtgaagaccccggcgacggtgtcgtgggccaggtcgtaggggagttggccgatgcggtcggggcgcagtccgtcggcgatggtgggccgggcgtccacggtgaccggccccccggcctgcagggccgcggtcagggcggggacggcgctgggctcggcgccgtagacgtcgatgtcctggcccgtggtggccaggcaggcgccggccagcgcgctgccgccgcccacgggcagcaccaccgcgtccaggcggccgtcagcggcgtccacctggtgcagcaggtccacggtggcggtggcctggccggccaccacgtccgggttctggtaggggtcgatctcgtccaggccgcgggtgtgtttcagttcctcgaccaccgcgatgcgctcggccagggtggttcccacctggatcacctcggcgccggtgtcccggatgcgcgtcaccttggccggtgcggcgtcggtgggcagcaccagtacggccgcaagcccgtactgggcggcggccagcgccacggctatggcgtggttgccggtggactgcgcgaccacaccagggcttttggcccccgccagccgctccacggcaaggagcgcgccacgcatcttgaaagagccgccacgctggaggttctccgccttcagccacagccgggccccggccagaccctccagctcctcgctgcgcaccacgggtgtgtgcactacacggccggcgatacggcgccgggcatcgtgcaccccgtcatgactcagcagcggcggctgcccggcgaaagtcacggcattcgcgccgaccgacatgaatacgtctccgcttctctgcgacatcgaggcgtcctcgggatgcaagccgcgcgccgaaaagagcaaaccaacagcatgtgcacgcggcggagcttccattcatgtcctgtcgacgggacacgaatgcacggcccgcgcggatgcgctgatacagcggtgcgcgtcggctgagggggattattcaaacagttcatcgtgccgttccactttggcggcgcctccgatggaaatgcaagcccgcccgggcgtacggacttcccggagcggaaaagctcccctttgttcgagggcctcaagcagcttgatgcgatcgcactgatgaccccagccggaactctggaacggcgaaggccccctcgtcggtgagggggccttcgtgtggggagcgcccggcaggccttgcacctgcattccccatcggatgatgggcgtctttccttggaccacggacgcttgactcccgtgccgtgcaccggagttgggtgaagagcgtacacggtgtcggacacggtcgaagcggggcggcgtacgccaacgccgtgtcggagtacgccgccctcggtcgggacgagctgggggaggtggtcggccaggtcgtcccggctacttcgggtcgcggttgtataccgactgtgcccagacgtagccgagcgcggagaggcccaggcaccaggcgatcgagagccacccgttgtggccgatctcggtgccgagcagcaggccgcgcacggtctcgatgaccggcgtgaacggctggtactcggcgatcggctggaaccagcccggcatcgagtcgatcggcacgaacatgctggagatgagcgggaggaaggccagcggcatggcgttgttgctggccgcctcgacgctcggactgaccaggcccattccgaccgcgatccaggtgagcgccacggtgaacagcgtgagcagggcgaatgccgcgagccactccaggggcgtggcgtccttggaccggaagccgatggccacggcgatggcgccgacgaagaccacgctgatgatcgcctgcagcgcgctgccgatgacgtgcccgatgagcacggagccgcggtggatcgccatcgtgcggaagcgggcgatgatgccctcggtcatgtcgttggagacggacaccgcggtgccgaccatggtgttgccgatggtcatcagcaacaggcccggcacgatgtaggcgatgtacgcggagcggtccgcgtgtccgccgccgatgcccgcgctcatcacgtcgccgaagatgtagacgaagagcagcaacagcaggatcggcgtgaacatcaggttcagggtgagggacgggtagcgccgcgcgtgcaggaggttgcggcgcagcatcgtggacgagtcgcgcacggcgagggagatcccggtcgggcgggcgggagccaggggagcgttcatcggacagcctcctcggccttgtcggcgccgccggtcagggcgaagaacacgtcgtcgaggtcgggggtgtgcacggtcagctcatccgcctcgatgtcggcggagtccagccagtcgaggatggagcgcagctcgcgctggccgccgtcactgggaatctgcaacgacagcgcttcgtcgtcccgggtggcctcgcgcagcgcgagggcggcgctctgatagacggacgggtcggagaagcggagccggacatgtccgccggggatcagccgtttcagctcctcggcggtgccctcggccgcgatctggccgttgttgagcacggcgatgcggtcggcgagctggtcggcctcttccaggtactgggtggtgaggaagatggtgatgccgtcggacagcagctcgcggatgatgcgccacatgttgtgtcgtgagcgggggtcgaggccggtgctgggctcgtcgaggaagatgatgcggggattgccgaccagggtcatggcgatgtcgaggcggcgcttcatgccgccggagtaggtggaggcgggctttttcgcggcctcgaccaggtcgaagcgctcgaggagctcggcggctgcccgccgtccctcgcttcgtggcaggtggtgcaggtccgccatgaggagcatgttctcttcgccggtgatcagcccgtcgacggcggagaactggccggtgacaccgatcgcggcgcgcaccccctccggtgacgtggcgacgtcgtggcccgcgacctgagcctgcccgccgtcggcgctgatgagcgtggacaggatctgcacggtggtggtcttgccggcgccgttgggcccgagcagcgcgaagaccgagccggccgggatgtgcagatcgatgccgtcgaggacggtcttgtcgccgtacgacttgcgcagaccggtggcggagatggcggccgacgacgtgtgaccgtcggccagcccagacgtgggcatgacaaaagaaggcatggtgccctccgttcgaaggctgaagtgggtgaggggcggggccggttgacggtgtggcgctcaggccgcggcgcggaggatgtcgatgttgccgtgctgggtgcgggcaatgacctcgaccgtgtcctcggtcttcttcggcgcctcggacacggtgagggcgttgcgcacctggccgaagcccgagctgacgtcgagccaggcggccgtgccctcacggacgccgacctcgatgccgccgtaggaggtctccagctgaacggtaccgctggccacttcaccgaggcgcacggcgccgttggtggtggtggcggtgaccgaggcctcggcccgccggatcacgatgtcgccgtggacgctgctcgcccgcagctcaccgatcgcggcgtcgacggtcgtggcgccgtgcgagttcttcaggacggcggggccgtcgacgaggccgacgcgcaggctgccggtgctggtggtgatctcggccctgccctcgacccggtccacgctgatcgaaccgttcggcgtggtcgcatggagcggcccggtggtgccgaggcggacctcaccggccgacgtcctcacccggacctcgccgaactggccctcggcgagcacctgggcggcgccaccggtcatgtcgatccgtgagcccgtgggcagctcgatcatcacgtcgatgatgccggtgcggccgaacagactggccttgggcgtcttcacggtcagcacaccgttcgcgtacgtgacctcggtctgcttggccgtccgcaggtcctggtccttcccgggctcgtggggccgcacctcgacgacggtgtcgaggcggtcgcccgcggtgaactggatggaaccggcttccacgtgcaccgtggcagagatcggttcgggggtgtcgaaagaaggcatggctgtcccgtcctcttgggtctccgggccgtccctgctggtgggacgtggtatgggtgaagtggtgcaggcaggggcgcggttagcgcacccagcccgtcatgttctgtccgacggtctgggtcttccccgtcgtacgcggccgggcgccggcgttgaccgcggccgacacggtgcgcaccagccacgcgttgaccgacagaccctcgcggttcgcggcctgttcggcgcgggccttgaggtgagccggcagacgcaggttgacgcgggcggtgccgccctcgtcgccgtcggcgggggctgggagcggttcgacgggtgcggtcggctccgcgggggtgccgctgtcggcgggcggcagcgtcagcacgaactcggggtcgagcccgcgcagccgaatgtcgaccgaacccggggcgagttcgcgggtgatctcgtccatcgcggcggagagcacgttgagcatggccaggtgggtcgccgactccagaggagcgacgagccgctcggccagctcgcgggcgtcttccccgctggcttcagcggccaccaccagttcgcggcggagggtgtcgatatgcggggtgaggtccatgacgtcatgatggcagcactgtggtgccatgcgcaagcccgcgtggcaccttaggcgagaagtgcctcaatgcaaccgctctaccagcggaaacgtgaagggatcgcccgggtcatggtggtgccacacgggtgaaaggtcggctggggagcgcggcatggcgcctgagtgacatggagtgatgccgtatgacgccaagcggtgtcgctccgcggtgcgcatggccgtggtcacggatcgacgtcggcgaaactgccgccttcgtccgctgcggcggaaacgggccgcagacggtgctgctgcacggcgcgcgatcccgacatggtgcgggccatgcgggagggctaccgcgccgaactcacgaccgaccggcggcgcgagcgggccgaccgcgacgccgtcgggcgcatcgttcgcccgacgccgatgctcttctcgctccgggatgacctggaggacccttacggcgaccccgtcgcgatccggcgccggtgggccaccgaagtgcgcgggcacggcaccggaactcatcggcatcgaccggcacgccgtcgcaccgcccggcggagccatcgtccacgccggcgaacccaccgggctgctccatgagtgcggccaggtcctcgttcaaccgccctcggcgtcctcctccttgcccgacggcatggcgagcaccgccgagaagttcgcccgcaccctcacgggcctcggcgacacgggcggcaccgatccgcgctgccttgcgacccacgacatcaagatcttcggcgacggcgccgtcctgcaagacggcctggatgcacggcggctgcggctccctgtgcgtgaacggtgccaccgacaccgagcgcaccgccgagaccgacgccgtggtccggcacgcccgcgccgccgggcaccagccagacgtccacgtcaccggcgaccgggcctgccacaccgccgcggaggccttcgcggcggccccgggcacccgcgccccgatgccgcaccacgtcatcctcggcgacttcctgaccgcgcacagcctggaggtgccggccgtgcacggcttcggtgccgacatgaaccccctggtcgcgacaagcgtccgcggctcggcgatcgtcgcgtcgtcgaggtcggccgatcgtatggaggccggctgtccggcgcatcgtcaggccggacggacaggccacctcgcagccctggcgacgggcgaagccagtggcagggcgccgatggaggcggcctggccgacacctacgagggcggcgccgtttccgggccgcagctcggcgaagacctcgcggaatgtgcgctcgctgtcgggcagccgcttgtcgaagctctgcttcccggccgacatcgaccggattcatcggaccgtcatgaaccgcacgggcattgactttagtgtcgctccgttattcctttctcaccgggaaccgctccggaatcggttccggaatgctcgatgtcttccatcagaggggaataaaggtgtcgcacacacagtcggaacggacggcgcacgaagaacgaaaggcatcgccccggcgttacctgatgtgccgtcccatgtacttcgacgtcacctactcgatcaatccgtggatggacccggatcgccccacctcgacacagaccggactggcccagtggaaagggctgttcgacaccttcgtcgacctgggccatgacgtacagctgatcgagcccgtaccgggacttcccgacatggtcttcgccgcgaacggcgcgatcgtcgtggacggcaaggtgctcgtcgcacgcttccggcacccccagcgcagggacgagtccgcggcatacgaggagtggttccgcctcaacggctggtccacggtccagcaggcggagtacgtcaacgagggcgagggcgacttcctcttcacgggcgaggagttcctggccggcaccggcttccgctccgaatcgcgggcccacgacgaggtgcgcgagttcttcgggcgccccgtgaccagcctgaccctcgtcgatccgcggttctaccacctcgacacggcactggcggtgctcggggacggggagatcatgtacaaccccgtggcgttctccccgcagagccgggcagtgctggccgagcggttcccggacgcgatcctcgccgaggacgccgacgccgccgtgttcggcctcaacgcgctgtcggacggccgcaacgtcgtcctgccccggaaggccgccggcctcgcggcgcagttgcgcgagcgcggctaccaccccatcggcgccgacctgaccgagctgcttaaggccggaggcagcgtcaagtgctgcacgctcgaactccgcgaatgaggcgcgaagccatgtgagggcagcgtggaccgcgggctgtcccgtcgacgggacagccgcaccggaacgcgcgagagaaacgatgaccattcacaccgcatctcaactcggaccatcaaagcgggggttcggtagttccatgccggggtgaggaacaacggaaccgtaatttgtggtagcactaattccacgtgatcgacccggccttcgagggggatgattcggccagggcggcgcggcatgcacaagccgtcggacggcaaggggctgaacttgggtgtgcattcgtatcccaccgacgggacgcgaatgcacggcccgcacggatgtgctggcacatcggcgtgtatcggctggtccggcgtacttgaattggttcatcgtgccggtctacgttggcggcgcggccgatggaaattcaatcccgcccggacgtggatccttctgggagcggacgattaccggtcgaagatgtgaacagcacatcgcacagtcatgcctgcggaaagggcctcgtgatacgcctatttttataggttaatgtcatgataataatggtttcttagacgtcaggtggcacttttcggggaaatgtgcgcggaacccctatttgtttatttttctaaatacattcaaatatgtatccgctcatgagacaataaccctgataaatgcttcaataatattgaaaaaggaagagtatgagtattcaacatttccgtgtcgcccttattcccttttttgcggcattttgccttcctgtttttgctcacccagaaacgctggtgaaagtaaaagatgctgaagatcaattgggtgcacgagtgggttacatcgaactggatctcaacagcggtaagatccttgagagttttcgccccgaagaacgttttccaatgatgagcacttttaaagttctgctatgtggcgccgtattatcccgtgttgacgccgggcaagagcaactcggtcgccgcatacactattctcagaatgacttggttgagtactcaccagtcacagaaaagcatcttacggatggcatgacagtaagagaattatgcagtgctgccataaccatgagtgataacactgcggccaacttacttctgacaacgatcggaggaccgaaggagctaaccgcttttttgcacaacatgggggatcatgtaactcgccttgatcgttgggaaccggagctgagtgaagccataccaaacgacgagcgtgacaccacgatgcctgcagcaatggcaacaacgttgcgcaaactattaactggcggactacttactctagcttcccggcaacaattaatagactggatggaggcggataaagttgcaggaccacttctgcgctcggcccttccggctggctggtttattgctgataaatctggagccggtgagcgtgggtctcgcggtatcattgcagcactggggccagatggtaagccctcccgtatcgtagttatctacacgacggggagtcaggcaactatggatgaacgaaatagacagatcgctgagataggtgcctcactgattaagcattggtaacacgggccggtgaaccccgcatgaatgttggttcatgtggggtttgcgccagctgtgtcgcagttgccccccgccactgttcccggggcatgaatcccgctagaatgaacacggaagagcaggtggaccccgggtcgtcaccgcacttcgggtgtgggatttatgccgattggttttgatcccacatccggacgggccggagtgcaccgcacacctctaagtaaggagtaggctgggagagaatcttctatgagtgatcgtgaacacgagacctatgacgtggtcggcattgggttcggtccgtccaacctgtcactcgccatagccctggaagagtaccgggcgaatggtccggagaatgagatcagtgccctctttctggagcgtcaatccgcgttcggctggcaccgcaacatgctgttgccgtcgacgaccatgcagatatccttcctcaaggatctggtcactttccgcaatccgacgtcgagtttcagcttcatcgcgtacttgcacgcgtcggggcggctcccgcagttcgtcaacaaccaggatttcttccccacgcgccaggagttccaccagtacctcgagtgggcgcaggcacgggtggccgatcgcgtcgcgtacggctcggaagtgacgtcgatccggctgccgccgggtgccgatccggagcggtcggaccggctgcgcctcgaggtggcggatgccaccggccgcaacggccgcgtggtcgaggcacggaacgtggtgatctcgaccggcctggtcccgagcatgcccgtgggaaccgagcgcgacgaacgggtgtggcacagttcggagttcctggagaagtaccgccggatgaaccccgcggaactgcgtcgggtggcggtggtcggggcgggccagagcgccgccgagatcaccaggttcctgtacgacgagcttccgcacgccgaggtgtgcgcggtcatcccgtcctacggctactccgtcgcggacgacacccccttcgccaatcagatcttcgaccccggggccgtcgacgactactacttcggcaccgagcagacgcgggaggcgttctggcggtaccaccgcaacacgaactactcggtcgtcgacgacgaggtgattcgggatctgtaccgcaggtcgtacgacgacgaggtacggggtgtgcggcgccttcagttcctcaacctgacgagggtcaccagtgtcaagcgcgtcggcgccgagacccgcgtctccctgcaggtgggccccgacgacgaggtgcgcgaactcgacttcgacgcactcgtctgcgcgaccggctacagcacgatggagcccacggacctgctcggcgatctcgaccggcactgcctgcgcgacgaggcgggccgataccgggtggagcgggactaccgcatcgtcaccgcccccgagatgcgctgcggcatctatctccaaggtggtaccgagcacacccacggactgacctcctcgctgctgtcgaacatcgctgtacgaagcggtgagatcgccgactcgatcgtcgccggccgtgcgggacggaacgccgagcgggcactcctcgccgaggtcggcggcgacacccgctgaaggcccgcaaaagaaagaacgggaccgggcgccacacccgcgacacccggtcccgcatgtctatgtctcctgcgagggacggatcggatccccgaggaatatccggcatcccggaggcgcggcttcgggagattcggtgatcgtgacggattccccggtgggccgggattcccaggtatttccttgtgtcaccgatcgtgccgatcactacatgtttccggcggacggaaagggggcttccggatgaggagtccggtggaagagcggtgggtacgccgcttccgtgacgacgacgggtgcgcgacgaagctcgtctgtttcccccatgccggcggctgggcgaacgcgtaccgtacgtggcatctgggactgccgtcggacatcggcgtactcgctgtccggtacccgggccgggaggaccggctcagcgatccgttcccgtccgggctggaagccctcgcggacgacatagccgacgcactcggcgagctgacgcggcatcggctggtgctgttcggccacagcatgggagcttcggtggcacatgaggtggcgctgcgcttgcagaaacggggatgtccgccggctgccttgtgcgtgtccggcagacgcccgccccatgcgctggacggccagcggcggttgtccggcacggacgaggagatcgtcgcggacgtcgtgcgcttcgacgagagcagggccccggtcttcgcggaccctgacctacgggagatcctgctcccggcggttcgcgcggactaccggttggtggacgactaccgcggtggccgccgacctctgctcgactgcccggtgtacggttacgccggtgacgacgattccgaggtgaccccgaagcagatgcgcgactgggcggacacgacgcacgacgccttccgtctccgggtgctgcccggtgggcatttctacctcagagcccaggaagccgcgctgctggcggacatgagaaacgtactgggtcgcatcaagtcccgtacgagcgcctcctcatgaggactgcgcgccctggatcgtaagaactcaccttgcggcgtacgggactccgtcgcgggccagatcctcatcgagaaggctgccgccgtacatccaacggtccgagagaccccggtcggcggtggctaccgcacccagccgttgaactgctgcttgccgcgaggggttcgcttgctgttggtcagcgccgcggcggaggctcggaccatccaggcgttgaccgagatgccctgtctggacgccgcctcctcgatctgatccttcatcgcctgcgggggtcggaagttgatccgagccgtcgtgccgctcatggcgccactgagcgctccggccgaccagtcgctcgccgcgtcaccggtctcatccgtggtgtcctcggtggggccgtcgtcgcccgagggcggagtcaccacaaaactgggctccatcccgcgcaggcgcaggtccaccgagccgggtgccagctcctgggtgatctcgtcggccgcggccgacagaaccttgagcaacgtgagccggacggccgactccagcggagcgacgaggcgctcggcaaccgcgcgggtctcggcgtctgctgccgcagaggttgtgaccagttcgtcgcgcagcgcatcgacgtactcccgtagttccatggagacatcatggcacactgattgcgccggtcggcgcctgcttggcccattcccgcgcgaccccctttggccaggtgaaacgtgtgatgcctcgacgagtcggctgccactcttggacttggcggctcgacgtggggccataagggcgccaggtcatatgccgcacgcggagtgcagccacgtgagtgccaccgcagcgcgcggatcaaccgcggtcacgcgagagcgggccgaggagaaggcggtcgtattcggccacggccatcacgctgttctcccgccacctcgctgagccaggtgtggcgggagagcttcagggggcggtgtggcaggcgcgtgatgccgtacggggcatgccacggacccttgcgtgctacgtggctgcctcgtacgccggcaccacgtgcaaaggggcaggccccggagagcgggggattttcctctccggggcccgcgagggcggcaccgatgaaccgacggggggacggtgtcggtgccgtgatcgtgaccagcgatcagctggtggtgccgtcggccgccgcgtcggatgtcctcgtccctgaccctcggggcggggcgatgacgaaggccggtttcggaacatcggtcgctcggcgagagagccacttcgttctccgcctcagcggcgaccgggatcttgcgccacagattgtcacgtactgcgaccgatccgtggcgccagtatggcatcgctttggcccccttgcaagtctcgcgtcctttgggtcgcagttgaagaaggaggccctgccgctggcaagtccccctgagcggcagcgaggtgccgctggcgccacgggtggggggatgtggcgccacgtcgccctcggtgacattccacgtgcaggcgcggagcccggctgcgatcggactcattccgcgcaggaacgctccaccacgacgtcgccgatcacggtccgggcctggacgcgcacgaactcgtcggcctgctcccacgctgccaggagcgcgagagacgtgtagacggtgcctgcggcggagtcgagggacaggcgggcgctggtggtctcggccacgccgatccggatgttgccgaacgtggtgacggcgacgacggttccccgcgccacctctccgatgtcgatgccgccctgggtcgtccgggcctccacgtcggtgtgcgcccggctgatcctgatggcccccttctcggtgtgcatgcgggcgactccgcgcacctttcccacagtggcgtcgccatcgcccatcgctctgatcgtggcccagccctcgacctgcctcaggtggacgttgccccggttcgccgtggcctcgacgctgccggccgcacggccgaccgtgatgtcacccagggaggaggtcagttgcaggctgccggtacggtcgagcccgatgcgccccaggcccgtgctgagttggcactcgcccagctctcccaccgcgaggaagtccgcggccatgccccgcccgtgcaggctcgatcctgtcggcacggctatcaccacgatgaccgcgcccccgctgccgccgggctccgggacgttcacgagcagccagccgtcggcgtattcgatacgcagctgctcggcggcttgcacgtcgtcctggtcgtcgctgtcgcgcggatacgcctccaccgtcgtctcggcgcggtcactcgcggcgatgcggacctggccgaacatcaggttgagcaccacgcggacaggcgcgggtgtgtcgaacgtcggcatggcgagccgccttcggaatgtctgaggccgccgatctggtgcagacggcagcccgaacgacgcaggtcgctctgtcacggggttggtctccggtctcggggtgcgagcgaccgggggtacgggcacgtaccgctgggggacgcggcgggttctggcccgccctcgccacgccggacacttcgccctccgccccgcgcgcgtcgcgtcccgtgcctgcctgccctttgtcgcccaccgtccgggctctccggccggggcctttcgaccctgcccggaagagaactggtgggggcacctttcggttcggagcgtaattctctgctgacatcatgtggtgccacattagtgtcataacggggtgtccgggcggggtgcgcctcggaactccatgtgacggcgagcggaatcggtcacagacgtacgggcgtgccccccgggattcgagtcgggtcatccagccgtcaccgaagtccggaagcgtgggaacgctccctcaccgatgtcgccgatgtcgccgacgctctgacggactgccggatgaagaagcgggccccggtggtgccatctccgcaccggctctgcgacaggcggcacggatcgccttgcgtctcggccggcctcgcagggaggtgccgacatattccagccaatgtaaggctgtggccgactgctgtgccgcctgcccctctggggcgttccgcaggtcacggtcgcgacgtcaacagagagccggacgcccgtatcccgctgtgacatgctgcgcgccaagatggcgtcgattgacagtagacatggcgccacatgatgtcatcatggcgctatgacagctctgcgatcgctctgcttcccgggagagttccgcgccggcacttaccggcgcttcacggcggcccccgacgccccctcgccccgggtgtccggagcgcggatgccgctcggcaacgggcggcgcaccgagcggggcgcgccgtgaaccaggcggcgaccaccgcggggccgcaccggccgctccccggaccgcacggcccctcggccatccaggtccggggactgcggaagtcgtacggaacggagaccgccgtcgacgacctccatctggatgtcccccacggcaccgccttcggcctgctggggcccgacggcgccggcaagaccaccgtgatgcgcatcctctcggcgcgcgtcgccgccgacgccggcgagatacgcatcgccgggtacgacctccccacagacgccgacgccgtacgcgcggccgtcgaactcgtcggccggacttcggcggtggacccccgcctcaccgccgagaagaacctgctgcggacatcggccctgtgccgactgccgccccgcgagggcgggtcgcgggcagccgaactccttgcgcggctcgatttgtcacgggtcgccaccgagcctgcggctgccttgtccagcggccggcggcgtcggctcgatctggcgatggtgctggccggggatccgggcgtcgtcctgatggacgagcccaccgcgggtctcgaccccgtgagccgccgcatcgtgcgggaggtggtgcgcgatctcgtcgccgacggcatcacggtgctgttcaccacctgctcgcctcaggaggcgggccggctcgccgaccggatcggggtcctgcgccgcggtcggctcgtcgccgagggcacgcaggacgcactgctacggctggtcccgggcggtcacatccgtctgtacttcgccgacacggccgaactcgccaccgccgccgcgctgttccacctggacacggtcgtccgggacgacaccgcgctcagcctgcggatcccgggcgacggcagcgtcggcctgatccgcgccgtcctcgccattctggaggagggccgcgtggagcctcggcggttggcggtgcacagtcccggactggaggacgttttcaccgcgctcgtgcacaacggcccccagggtccgccacccacccaccgcgccgtgcactcgccggacgccccactcggggaggaagcgcgtgacatccggtggctgtggcgcgaggtcctgcccgtcatggccgcgttgctgctgctctgcgcgcatgtcgcggaggccgggcccgccgtcctgcccggcgtgcttccggccgccctggtgtgcgtggcactcgcgctcgccgggcgccgcagacgtgccgccccccgttcgccgaagcaccgcggccctcacgcgtagcccctgaccgcgtcggcgccgaccgttgcgtcccaagtcctttcgacacacctcgtcttcgctacgtactaacgggagttggatcacattggctaccttgctctacaggatcggccgcttcgccttccggcgacgaggtctcaccgtcctgctgtggctcctggtcctcgtcggggccggagtcgccgcttcatccgcgccgccccctcccaccgacaccttttccatgccgggcacacagtcccagaaggccgtcgacctgctgaaggagaagttcccggccgcaagcgccgacggtgcctcggcccgagtcgtggtccgcgcaccgtcgaaccagaagatctcgaaccccaagccgaagaagaatgtggcggctctcgtcgaggacctgtcgaaggccccgcaggtcgtcgcggcctccgatccgttcaccacgggcgccgtcagtaaggacggcacgacggcctacacgatcgtcacgtacaaggtcgccgccctgaaggtgtccgacaaggcgcatgacgccctgagcaaagcggccgccgacgcccgcgcgaacgggctcagggtcgagatgggcggtgacgcggtccccgtgaagcaggcggcgggcggctcctccgagagcgtcgggatcggcgtcgccgctctgatcctcctggtgaccttcggttcgctggtggcggcgggcatgccgctgctcaccgccgtcgtgggagtaggcgtcggcatctccgcgatcggcgccctcggcagcacgctcggcctgtcctcgaccaccacgaccctggccatgatgatcggcctggccgtggggatcgactacgccctgttcatcgtctcccgctaccgcgccgagatggccgaggggcgacagcgggaggaggccgccggccgggcggtcggcaccgcgggctccgccgtggtcttcgccggcctcacggtcgtcgtcgccctcgccgggctcgccgtcgtcaacgttccgatgctgacaaagatgggtctggccgcggcgggcaccgtcgcgatcgccgtcctggtcgccgtcacccttgtaccggcgctgctgggcttcgcgccgttcaaggtgttgcgccgcagggaccgcaagcggatcgcgggcaagccgctgtccgggcgtcagcgtcgcaaggcggcgaaacgggcggcccggcagcggccgaacctgggtgcccggtgggcgagcttcgtcatgcgccgtcccgtcatcgtcctgctgttcggggtcctcagcctcggcgccgtcgccgctcccgcgacccggctggaactcggcctgcccggcgagggcaccatggcccccgacaccacccagcgcaaggcgtacgacatgctgtcggagtccttcggccccggcttcaacggacccctgacggtcaccgtcgaggcccacgacgccaagaccgtgggcaaggacgtcgccgccaagctgtccgacgagcccggcgtcgccgaggtgggctccgtgaccccgaacaaggcgggcgacaccgcgatcgtcaacgtcgtaccggacaagggaccgacggacgacaagacgaaactactggtcaaaaacctgcgcggcgacctcgcccgggtcgggcgtgtccatggcgccgaaatcctggtgagcgggcagacggccatgttcatcgacttctccaagaccctcagcgacgcgttgctgccctatctcggtctcgtggtgggtctcgctttcctgttgctgatcctcgtcttcaggtcgttcctcgtgccgttgaaggccgctctcggattcctgctgtcggtgtccgcggcgctcggtgccgttgtggcgatcttccagtggggctggttcgccgacatcgtgggggtggaccagcctggcccgatcatgagcacgatgccgatcatcatgatcggcgtggtcttcggcctcgccatggactacgaggtgttcctggtgacccggatgcgcgaagcctatgtccacggggagtcgtcccggcaggcggtcgtcaccggcttccggcacggtggtcgcgtggtcagcgcggccgcgctcatcatgaccagcgtcttctccggattcatcacacaggacaacgtcttcgtacggatgatcggcctcggcctggccctggcggtcctcttcgacgctttcgtcgtccgcatggccatcgtcccggcgctcttcgccgtcctcggcgaccgcgcgtggtggcttcccaagtggctcgaccgcatgctgcccgacatggatgtcgaaggcgagaagctgtcgcgccggctcgcggccccgcgggacctgcgcgcggcgcgcgaccacgagtacagccgctgatgcgcgccgtgggggccggttcgatcccggaatcggtccccacggtcgagaggacgtcgcgccgcgtcgctacggcacccgctgtgccgtgttgcggcacggcacggcggtgagcccgtgcaggcgctggaaggcgtacgcggcggagacgagtgccatgtggtggtaccagccggggaacgagcgtccctcgaagtccagaagcccgaagtcctgctccatggaaccgatcgcgtccgtcgtcccgcggtgcagtgaggcgatcgaggcggcctccgcgagggggtggtgggcgaggctggtgagccacagcaggcccggtgagcgggcggggcccacttcggtgaagagccggtaaggaggtccgggggagcggccctgggagccgcccgccagatggacgagtgaggtctggaggtgtgtgatgcgctgctctccgccgggcaggtggacgagggccgtctccgggctctgtgcggagaccagggttcttgcgcgcgctggtaccggggcgccctcgcgggcgggcagcaccgccagatgcggtggcaccgcgacgacgaagtcgcggcggcgcttggcgagtccgtgcagcagatatcccacatcgggttcgtcgctcatgtcgacgagaacgaccgaggacgtggagtgcgtgcgggccgccagccggtccacgagtcggagcgtgtgtgcccactgcggccggtaccgctcgaagtccggtatacgtacgtccctgcgccgttcggggtcctgtgtccaggtcgtcggcaggtgcaggcaccagtcgacgggaacgtgagcggtgtccacgcacaggaaggatcccagtcccagctggcagttgagcgtacggcccgaggacaggtcgaaatagcggtggacacccaccgaccggtcaccacgcttgggcaggacggcccggccgatggaccacacgggctcgggtcgacggtccgccacccagtgggtgagttcctccatgacctcgtcgaaatcccatgggctgagactcacgaattggcgcagcgactgcacgacggacgggtcgcgggagaccacggtggcgagccggcgcaccgacttcttgcccgaggtgacgagcagccctttcaaataggcgtgtgcccacttacgttgatcggtccggcgtaagcctttgaagatcgtgctgctaaaccggttcagaggcaattctgaattgatggcgcacctagcgcctcgtgaagtcgacgaggtgtccgcttgggtggtattcatgccgcaataactcccccgatgttactgagcgttgtgatggcagagtctaggtcccgctccagtgtggcgccactgtaagaggttggtcgacctgttttggcgcctcgatggcgcacggcctcggggtcctggtggcaggatgacggctagattcagctcatcccttcatggggtgggccgctggccctcgttgtcggcgacagtgtgtggacttcgcgatcacggtgtgatgacctgcgggaatgtggcgcttgcgtactcgatcggggcggtggcgaggggtggaggtggcgcttgagggggccgtgatgcattgcggctcctgattcggagcgccgcaggccctgggggcgcacctagatcacgccaaagcagtggcctagaccactgaatcagaggagtgttcgaactctgcaaagtagtgctcgatggcgccaagatccttgaaccggcatcgatgtcgggatctactcgggagcacggcagttggccatcccgacctcaacgggtaaccgtgcaatggctggttcattcagcccggcagtactcatctgcgagcggtggccactgctcttggcatgcgtgccaaaaaacggggtgaacgctttcggcatccgatggggagccaccgcgaacccgcttggtcgatacgcgcatttacggggaggcgtgatgacgaatcaggtcgaggactgcaaagactccaaggcggtcatgttcggcagagccgcggaggctgtgccgaggaaccgaagagccggtggggtggattcgcggggtgatcaggtactcaccacgaaggtgggactgcacatacccattggactcgccttcgaggagtgggaacgcgccgggcgccagctctccgggctgctcaactcctcgtcctggtggctcggggactggctcgtctacggcaaggaccactatgcggaccgctatgagcgcggcatccgcgctgccgggctgcaataccagacgctgcgcaactacgcctgggtctcccggcgcttcgagctgcaccggcggcggcccgcgctcagctttcagcaccacgccgagctggcgtcgctgccgctcgacgagcaggaggtctggctcgaccgtgccgagcggatgaagtggagcaccaagcaactgcgcaacgccatccgggcccagcgcgagcccatcccgcagcagacggacgccgtggcgacgacgagccggctcgccgtgcccgacaaccggctgcagtggtggcacaaggcggcggcccatgcgggcaccgagttgggggagtgggtgacggccacgctcgacgcggccgcggaccaggtgctgaaggatgccgaccggcaacaggatgccgaccggcaactcaccctcgaatgaccggttcatgagaaccggcccgtaaggcggtcgcgtcggggacaggcgggggtgtccggccggggcggtgaaagtcacggggtccgcacacgtcaaggggtgcggaccccgtgtcatgggtggaaccgttacggcagacggttcatgagatccgccgtctgtacgtgccgggtgcattcgcgcccggcgaatgactgcaccacccgctcgcgaatctcgggacgctgttcctggctgagcttgaacattccctcggccttggtcacccggacacggaaagcgccgacgccggtcactatcttgcggaaatagtcgaccgattcgctcatgtcccagctgtcgccgaattccccctcgaaggcttgcacggtcgcctgtacgacatccagggtctcctccgtcgactcgatcttctccaccactccgtgcacatgcaccgaggtgaagttccatgtcggggcggcaggcgtgacgtcgtagacggtgggcgagacgtaggcgtgcggaccggtgaacgtcagcaggatcgccgacccggtttccagcgccgcccagtgcggattggcacggttcatgtgacccagcagaggcatgcccgccaggtccgcggtggggctgccctcccactgggggtcggtgatgaccgggaggtgggtggcgaaaggtccgtcagcgggagttccattgctggccatcagtgccagcgggttcccgcgcatcagatcgaccatccatgagacgtccggttcccggtagtggctggggacgaacatacagcactcacctttcgtggtgtgacgaaaacagtgcctgtccggcatcgaggccttgagacgcggcaatgatgcggcgaatggtcgacgacatcgccgtactgtcctgttggcaggacaacggggttctccatcgtggcccgttgtcgtctccggcgcaatgaagggacgaaccggcatcaacgaatcgtccggcgggaacggaaagaggaagcccggcggtatcgaatcagaacggcggtgagtttccatgccgcagcctgtacctggaaaaggaccccgtcagccctcaggaggaattcatggaaaacgggcaggcggtcctggcagcttctccggaggcggccgctcggccaccccggcgtccggtccggattctggtcaggagctcgaagcgacggcggcttgccgcacgccgcgggacttggtgtgatgcgggtgttcccgagaacatcgccgagcagggtgaacgcgcggccccgtgcggtgttcaactgctctgcctcggtgaacaacgagggcggccacaccgggcccgagccggaccgccccgacccatccggatccgacccccgcggcggatgggccggggcacccctcgacgttccgatctacgggcttcggacctgaggccttgaggaagacgcggatctggcgggcacggctggtctcatggagggatcgtcgcccacgtgtggtgcggggaacggggcggttcgtcgcccgcacctcccacgcgctcggatcaggccgggcggccgcgccgtaccgcctcgatgccggccgcaccgtcgtgtgcctcgtcgacgatctcgatgtccggggccgagccgagaatggtgcgcaggaacccgcacaccatgggctcgtcgtccaccaccactacccgggccacgctcacaccgccgattcggaggtcgggacgaacacgggcagcgtcgcctcgacgctgaacccgccgtcggaacagggtccggcacgcaacgtgccgtgcacgagctcgatgcgctgccgcagtcgggcgatcccgagacctgagccggtaccggccagggcgccgcgaggtccaccggtcggtggcgtgtcgcggaccgtcagccgcagctgtgccgtgtcgtactccacgcccacgttcacgcgggcgccgggagcgtgcttgcgtacgttggtcagcgcctcgcgcagcacgcggtaggcggtgcgcccgaccaccggtgaggccatcgccggatcgccttcctcgatcagctcggtcggtatccccaccgccacggactcggcgaccaggccggcgaagcccgccaccgagggcgtccggtcgccctccggcgcggtgcgcagaatgccgaccaggtcccgcagctcctccagcgcctggcagcccgcggagcgcagttcctcggccgcctgccgggtcgcctcgtcgggtgccgtcaccctcagggcaccggcctgcagcaccatcaggctcactcggtgggtgaccacgtcatgcatctcaccggcgagccgggcgcgttcttcggcgcgggcccgctccgccagcagatgacgctcccgttcggcgcgctcggcgcgctcgaccagtgcctgcatcagcctgcggcgggtgtcgaagtacagcgccggcagcggcccgatcgtccgttactacgggcgatccgcgctccagtactacgtgtccacggtcgcctccgtgtacttcatgggcctgctggcgcactgcgtgctggtgagcgtcgtcgaggtcctgctcatcacggcggtcggcaggctttacggcgtcccgttgcccgccgcctcgcggtggcccgtgctcgcggtgtccctggtgctcggcgccgccggtcgtgcaactggtgctgttcccgctcgtgttcatctcgggcacgtacgtgccgatccactccgccccgctgaacggcatcgccggtgcgctgccggtgaaaccgttcaacgacgccctgctccgcgccttcaccacgaaccacgccggcctcccctggcgggaccacggcgtcctgctgctgtggggggtggccggtgcggcggtggccgtccggcggttccgctgggatccgcgtgcgcagtgagcgacccggcccgggaccatgcccgccccgggcacgagggccggggcgggtgcgaggtgcctacagctccgtgcgtaccgtgcgggccgcggtgaccaggttctccagggaggctcgggtctccggccagtcacgggtcttcaggccgcagtcggggttgacccacagccgctcggcggggatcgccttcaggccggtgcgcagcaggtcggcagcctccgccgcgctgggcacgcgcggcgagtggatgtcgtagacgccgggtcccgcctcgcgcgggtagccgtgggcggcgagttcacgggccacctgcatgtgcgaacgggcggcctccaggctgatgacgtcggcgtcgagatcgtcgatggcctggacgatgtcgccgaactcggcgtagcacatatgggtgtggatctgggtgtccgggcggacgccgctggtggtcagccggaaggcccgcgtggcccactccaggtacgcggggcggtcggcggcacgcagggggagggtttcgcgcagggcgggctcgtcgacctggatcaccgaagtacctgccgcctccaggtcgttcacctcctcgcgcagggcgagggccacctggcgggcggtgtcggcgaggggctggtcgtcgcggacgaaggaccaggcgagcatggtgacgggaccggtgagcatgcccttgaccgggcggtcggtgagggactgggcgtacgtcgtccagcgcaccgtcatcggctcggggcgcgagatgtcgccggccaggatcggcggccggacgtaacgggtgccgtaggactggacccagccgtgctgcgtggcgaggtagccggtgagccgctcggcgaagtactggaccatgtcgttgcgttcggcctcgccgtgcaccaggacgtccaggcccgccttctcctggaaggcgatcacctcgcggatctccgccccgacgcgttcctcgtatccggcggtgtcgatgcggccggccctcaagtcggcgcgcgcggagcgcagttcgccggtctgcgggaaggagccgatggtcgtggtggggagcgcggggaggcgcaggtgggcgcgctgggccgcggcccgctcggggtatggccggcagcggcgcgcgtcgtcgtccgtgacggcggcggtgcgggcgcgcacggccgggtcatgggtgatgggcgagtgtgcgcgggaggccagatcggcccggttcgccgacagctgcgcggtgatcgtgtcggtgccgcgggccaggcccttggcgagggtgacgatctcggccgtcttctgccgggcgaaggcgagccagcgcaggatctgcggctcgatgtcccgctcggccgccgcgtcgagggggacgtgcaggagtgagcaggaggccgacacgtcgacccggtcggccaggccgagcagggtgccgagcgtggccagggaggccgacaggtcgttgccccagatgttgcggccgttcacgacaccggcgaccagccgcttgccgggcagtccgccgacggccgcgagcgcgtccaggttggcggcggccgcctcggtgaagtccagggccaggccctccaccggtgccttggccagcaccggcagggcatcgccgagccggtcgaagtaggaggcgaccagcagcttgggccggtcggtgagggcaccgagatcgcggtaggcgcgggcggcggcgttcagttcggccggggtacggtcctggaccagggccggctcgtcgagctgcacccactcggcaccggccgcgcgcaggtcggcgaggacctcggcgtacaccgggagcagacggtccaggagggtgagcggctcgaagtccgcggacaccccgggcgcgggcttggcgagcagcaggtaggtcaccgggccgaccagcacgggacgtgccgtcaactccagggcgagggcttccttcagctcggagacctgcttgccggagtcggccgcgaaccgcgtgtccgggcccaactcgggcacgagatagtggtagttggtgtcgaaccacttggtcatctccagtggcgcgacttcctgcgtgccgcgggccatggcgaagtagccttccagcgggtcggcggcgacggccgcccggtgccggtcggggatcgcgcccaccatgacggtggtgtccaggacgtggtcgtagtacgagaagtcaccggtcgggacctcgtcgacgccggcctccgccagctgccgccagttggtgcgacgcagttcggcggcggccgtgcgcagggcgtcggcggtgacccggcccttccagtggccctcgatcgccttcttcagctcccggccctggccctggcgggggtagccgtacacggtggcccgtgctgccgcggctgcggacttggtggtcacggagatctccttcgcgagatgaatccctgagatcccggggacgggacgagagcgcgaaggggtgacgtaccggacggcagcggccgtcggccgtccgttcggtcacgcacgccgacccgccctcgaggtcaccgggattccgcgcacgagtcgtcccgtacgcgggcagttggcaggtcttcggactcgcgggcacgtcctcatgggggaggacacctactggccgtcgcttcccagaccctgtacatcgggcccagtgcgtatgacggcggtcgttcccgctcaccgctgcggggcagtcccggatttccaccgggttccctcttacgacgcgtcccgcctggctgacggggcgaaccagctgcaccggccaccctacggggtcgggtcgtacatgtggaatccccgaccggccttgcggcccagcagccccgcttccaccatccgctgcagcagcgggggaggggcgtagaggggttccctgaactcgtcgtacagggactcggcgatcgaggccacggtgtcgagcccgatcaggtccgccagcttcagcgggcccatggggtgggcgcagcccagttccatgccggcgtcgatgtcggcggcggtggcgaagccggactccgtcatacggatcgccgagagcaggtacgggacgagcagcgcgttgacgacgaaaccggcccggtcccgggagcggatgaccgtcttgccgagcgtgagcgcggcgaactcctcgacgacggccgccgcttcgggcgccgtgtgcagggacgtcacgagctccaccaggggcagtacggggacagggttgaagaagtgcagacctacgacccggtcggcgcggctcgtggccatgccgaggcgcatgacggggagggaggaggtgttcgtggccaggacggcctccgggtcctcgacgatcttgtcgagggccgcgaacacctccgccttggcgtcggcgttctcgacgacggcctcgacgaccagctgccggtcggccaagtccgccggctcgccggtgaagaccaggcgggcgagggcgtcctgtgcggcggaccgctccagcttgccccgccgtacggcacgctccagggaagccgccacccgctcccgcgcggcgtgggcggccgtggcgtcggcctcgcagacgatcgtgtcgatcccggcccgcgcgcacacctcggcgatgcccgcgcccatctggccgccgccgaccactccgacacgccggatgccgccgctcatgaccgggcctgcgtccggcgcaccaggtggcgggcataggcgtccggggtgaagaagagcggcaactcaccggtcagtgccgtgcgttcgaagagggcccggacctcctccacgggtgcccacgggtactcggcgcccagcgccgcgagttcctcgtcgagcagcccgaggaccgtctcccggtcgatcacccggtgccgcagccactgccagatctgcacccgggcgatctcggcggtggccgcgtcctccatgaggccgctcagcgcgacggcgccctgcccgcgcagccaggcggcgaagtagcgcagggcgaccgagatgttggtccgcacgccctccgccgtgggcggcccgctgatccggcgcaccgagagcagatccgcggccgtcacctccacgtcgtcccgcgtccggtcgagctggtgcggacgctcgccgaggacaccgtcgaacacctcgcggcacacgggtacgagtgcggggtgcgcgacccaggagccgtcgaagccgtcctcggcctcccgctccttgtccagccggaccttggcgagcgccgcctcgtgggcggccgggtccttgctcggcacctgcgccgccataccaccgatggcgtgggcgccgcggcggtggcaggtgcgcacgaggagttcggtgtacgcccgcatgaagggcgcggtcatcgtcaccttggcccggtccggcagcaggaagtcggtgcggtggccgaaggtcttgatcaggctgaagaggtagtcccagcggcccgcgttgagaccggagctgtgctcacgcagctcgtagaggatctcctccatctcgaacgcggcggtgatcgtctcgatcaggacggtggcgcggatcgtgccccgggggatgccgaggagttcctgcgcggtgacgaagacgtcgttccacagtcgggcctcgtagcggttctccagcttcgggaggtagaagtacgggccgtgacccgcgtcgatctgccgctgcgcgcagtggaagaagtacaggccgaagtcgacgagcgcggcgggcacggggcgtccgtcgtactccaggtgctcctcgtcgaggtgccagccgcgcggccgtacgacgacggtggcgagccgctcccgcccgtcgagccggtactccttgccgtcgtcggcggtgaagtcgatgcgccgctcgatggcgtcgagcaggttcagctgcccgtcgatcacatggcgccaggtgggcgcggtggcgtcctcgaagtcggccatccacacctgggcgccggagttgagggcgttgaccgtcatacggcgctcgggcgggccggtgatctccacacggcggtcggtcaggccgggggcgggcggcgcgacgtgccaggtggcgtcggcgcggacggcggaggtgaccatggggaagtcgagcggggacccggcggccaggcgcagggcctgccggcggcgttccctcatcaggtcctgacgccgcttgccgaaggccgccgccagccggccgacgaagtccagggcggcgggggtgaggatttcatcatggcggtgccccggggcaccgaggacgcggacatgatgggtcagtgaactgatggacatcgggtctcctgaagaggacgcaaacgaagggtgcggaccgaccgtcattccgtcgaacacacctgggggcgcggggctgtatcgacacgcggccaccgccgcgtgtgcgcgaccagcccccacgcacccgcagtcgacgaaccggacctagtggaactgctcctcctccgtggacccggccaacgccgtggtggaagaggcgggattcacggcagtggagaccaggtcgaaatagcccgtaccgacttcacgctggtgcctgaccgccgtgaagccgtgcgcctgcgccgcgaactcccgttcctgcaggtcgacatacgcggtcatgccgtgctcggcgtaaccgcgggccaggtcgaacatgccgtggttcagggagtggaacccggccagcgtgatgaactggaagcgatagcccatcgcgcccagctcccgctggaacttggcgatctggtcgtcgtccagcgcggccttccagttgaaggacggcgagcagttgtaggcgagcatctggtccgggtaccgggcgtggaccgcctcggcgaactcccgcgcctgcgccaggtcgggcgtacccgtctcgacccagatcaggtcggcgtacggggcgtaggccagaccgcgcgcgatgaccggcgccatgccgttgcggacccggtagaagccctcggccgtgcgctcgccggtgacgaactcggcgtcgcgctcgtcgacgtcgctggtgagcaggttggcggcgagggcgtccgtgcgggcgacgacgagggtcggcacatcggcgatgtcggcggcgagccgggccgcgttcagggtgcggatgtgctgcgaggtcggcaccagcaccttgccgccgaggtggccgcacttcttctccgaggcgagctggtcctcgtagtggatgcctgccgcgcccgccgcgatcatcgccttggtcagctcgaaggcgttcagcgggccgccgaagccggcctcggcgtcggcgacgatcggcgccagccagtcggtcgtgtcgccggcgtcctcggcggtggcgatctggtcggcgcgcagcagcgcgttgttgatccgacggaccacctgcggaacggagttggcggggtacaggctctggtcggggtaggtgtggccggcctggttggcgtcggcggcgacctgccagccggacaggtagatcgcctgcaggccggccttgacctgctggacggcctggccgccggtcagggcgccgagcgcgtggatgtagtcccgctcgtgcagctcgcgccacagccgctcggcgccgcgccgggccagtgtgtgctcctcgcggacgctgccggagagccggatcacgtcctcggcgctgtaggtgcgctcgatgccccgccaacgcgggtcggtggcccagcgccgcgcgagttcctcggccgcccgcgtcctcgtctctgccatgactgtcatgtctcctcggtctgtgccggctgccaatctccctgtccgtaggaacaggtgtggcactgtgtgtcgcttagctgggatacggcccgccgtcacgccgtgggacggaggtgagcaacgctgccggtgaacgaccccgtcggcgccgggatctccgacgtcagggcatgaatcgcgccccggttccgggcggtggtcgccggtgtccggcgggccgcactgagactctgacactggcactgagtgccaacaaccgtggacatctgccaacttctgcgaatcttctcgtcgccgttcgccaagtttgcgaagggcacgggagcggcccgatggcgtacgttggccgcagccggacacggaggatcacggggtgggcaagacgtacgccggggcgcgcctgcggcacctgcgcgaggaacgacgcatgagccaggccgagttggcccgtgtcctcgccatctcgcccagctacctgaaccagatggagcacgactcccggccgctcaccgttgcggtcctgctgcgtctgaccgaggccttcggcgtcgacccgggcttcttctccgcgcgcgacacgacgcgtctggtggcagacctccgcgaggcgctggccggggaactggccgaggcccgggtctccgccgccgacctgacggacctcgcctcgcggacacccgaggtcgcccgggtcctgctcgacctcggccgccgcaaccaacggctcgccgagcgcctggccggagccacggacggccgcggcccgggcccggagcagcccggctcaccgcacgaggagatcagggacttcttctaccgccgccagaattacctccacgacaccgacctcgcggcggagcggctctcccgggagatcggcatccggcccggcgaggtcctacgggcgctgaccacgcgcctcgccgaccgccacggcatccggctcaccgccgagcgcggcgaccatctgcaccactacgacgagccgacccgcacgcttcacctgtccacccgtctgcgccccggccagcgcgccttccgcatggccacccagctcgccctgctcgaacacggcgacgaactcgaccgcgaggccgccgaggacttcgagcccggatcgcccgcccacggcctggcccgcatcggcgtcgccaactacttcgcggcggccctgatcctgccgtacgacgccttccacacggccgccgaggaggcgcgctacgacatcgagcgcctcaccgaccgctacggcctcggctacgagaccgtctgccaccggctgagcaccctccagcgccccaggctgcgcggcgtgcccttctccttcgtccgtgtcgaccgggccggcaacatgtccaagcggcagtcggcgaccggcttccacttctcccgggcgggcggcacctgccccctgtggaacgtctacgaggcgttcgccgtccccggacgcatccacgtccagatcgccgaaatgcccgacggacagcgctatttgtggaccgcccgcgcggtgacccggcaccgcggcggctggggtgaacccggcaagaccttcgccatcggcctcggctgcgagatccgccacgcccaccgcgtcgtctactccgacggcctcgacctcgcgaacgcctccgccgccacccccatcggcatgggctgccgtgtctgcgaacgcctcgactgcccccagcgcgccgcaccgcccctcggccacccgctgcggatcgaccagaacaccggcaccttcgtgccgtaccccgtctccgacgcccggagttgacgcggtcggcgggagaggaagatcacggcgaccgaggcggtcttggccatgcacgcctggcgcggtacggtctgtccgatatcgacgacggcgagacggaagccggtgggaatccggcacggtcgcgccactgtatgcgagacgccttccggggcgtctggtgagtcagacccgtggccgtcgtcatgtgcaccaccgagatgggacgcgaactcccagaggaggttctgccatggcgcagaccgtcgcccagccgacagccaccacccccgtcgttcccgccacgctgccgctgaaggcgattgctccctgggcggtcttcttcggcatcctgatgctggtcctgctctacttcgtcggcgccgagcagggcgccacctccgtgttcaacggcacggacgtccacgagtgggtgcacgacgcccgccacctgctcggcttcccctgccactgacgccagggacgccgcacccccatgaactccgcaacggtaagaaacctcctcgtgcggggcatgctcgccggcctggccgccggcgtgctcgccctggtcgtcgcctacctgctcggtgagccgaacgtcgacaaggcgatcagcttcgaggacgcccactcccacgagcacgagatggaggtcgtctcccgctccctgcagtccaccgccggtctcgccaccggagtcctggtctacggggtcgccttcggcggcatcgccgcgctcgcgtactgcttcgcgctcggccgcgtcggccggttcggcccccgggcgaccgcgctgctgctgtccggctgcgcgctgctcgccgtgtacgtcgtaccgttcctgaagtacccggccaatccgccgtcggtcgggaaccccgacaccatcggcaagcggacgaccctgtacttcctgatgatgctgctcagtgtgctgctggcggtcgccgccaccatcctgggcaagcggctcgcgcccaccgtgggcacctggtgggcgaccgtggccgcggtggccgccttcgtcgtcgtgatcggcctggcctacgagttcctgcccgtcatcaacgaggtgccgaaggacttcccggccaccctgctgtggcggttccggctttcggcgctggccatccagaccgtcatgtggacaggtttcgggctgctcttcggcgagctggccgagcgcctgctgaatcccaagcccgcgacagccgcgtccagacgcgcggttcccgcctcgcactgaacgcttccggacaacgagagggcccttcggaaccatccgagggccttctcgcgtttccgggacaccggcggaggcgacgagcggaggagccgagtggccagacaccacccccagccgcgtcacatcaccctgggcggccgagaagcggtggccctgaccgtgcgggagtacgagcaactggtcgccagccgacgccagatcggcggccagagcgcacgggtgcgggtactggcccagcaggtcaagcgcgacgcgaggctgctgcgggaactcgaggccctggtcgccgacccggcttcccccttcgcctgtcacgcgccgggcgcggcagccgggacaccggacgcggccgggtgccccggccacgacggcacggccgacggcatggatcctgcctgtctgcggtgcgccatcgcggcgctgctgcgccgccaccgggaggagaagccctagcccccgaccgcgggcgccggtgtcagtgacccggcgcgtcgcccggcgcggcgagggcggctccgagacgcaggttccaccgccctgaccggccggtgacctccgtcgcggtgagcggcgggacgtcgacgcgccagaacgcggcctcgggcgcgcccagcacccccaccaccacggcccgtaccacctccggctccaccacggcgagggtcctgccgtcccccagccgttccgtgtccagccagcgcgcgaggcgggcgcacagctgccgcacggactccccgccgtgcggtgcggcgcctggatcggccagccagcccgccaccgcttcgggctcggcggcgctcacctcgtccagggtccgcccccgccatctgcccatgtccaggcccgcgagttccgggtccgccgcggcgtcgaggccgagcgccgcggccgtctcacgacagcgcacgccgggggaggcgacgacacggacggcggcgggcagggtcccggccgtcgctctcgcccgcgccgccgcgtcggcctcgatcgagtcgccgtcgtcgaagcgtgcacgccgcagcgacggtgtgatcgccgctgagacgaaggtgacacgactggtcacgcggttgttcctcctgctggtgccgcgggccggctcactgcgcgccgaacgcccgcaggatgcgttccgcggccagggtggccgtcaacgagccgtccctgacctgttgttcgagcgcgggggcggcctcgcggaccgcggggtccgcgtgcagtcggcccagcagttcgtcgcggaccatcgaccaggtccagccgacctgctggtcccgccgcttggcggtgagccgcccggtggagtcgagcagtgtgcggtgctgttccaggcgctcccacaccacgtcgaggccgatcgactcacgggcactgcaactgagcaccggcggagcccagaacacgtccttgccgtgcatcagcctgagcgcgcccgccagctcccgtgcggccgcccgcgcgtcgcgctcgtgcgggccgtccgccttgttgacggcgatcacgtcggccagctccaggacacccttcttgatgccctgcaactggtcgccggtgcgggccagggtcagcagcaggaaggagtcgaccatgtcggcaacggcggtctcggactggccgacgccgacggtctcgacgaggatcacgtcgtagcccgccgcctccatgaccaccatcgactcgcgcgtcgccttcgcgaccccgcccagcgtgcccgcgctgggggagggccgtacgaaggcgttcgggtccaccgccaggcgttccatccgggtcttgtcgcccaggatggaaccgccggtgcgtgtggaggacgggtccacggcgagtacggccacccggtggcccagcgaggtcagcagcgtgccgaacgcgtcgatgaacgtcgacttgcccacgcccggcaccccgctgatgccgatccgccgcgcccggccgctgtgcgggagcagctcggtgagcaactcctgcgccagcgcccggtgctgggggcgggtggactcgacgagtgtgatggcgcgggccaccagggcccgcttcccgtcgagcacacccttcacatatgtgtcgagatcgatcgctgccatcggccgctacagatcgtggccgaggtcggccgcgagtcgtcgcaccaggtcgtacgccgcgtccgggatcaccgtcccgggcccgaacacggccaccgcgcccatctccagcagcgtcggcacgtcctgcggcgggatcacgccgccgaccacgatcatgatgtcctcccggccctcctcggcgagcttctcgcgcagcgccgggacgagggtgaggtgaccggcggccagcgaggacaccccgaccacgtggacgtccgcctcgacggcctgccgggcgacctcctccggggtctggaacagcgggccgacgtcgacgtcgaaaccgaggtcggcgaagccggtcgcgatcaccttctggccgcggtcgtggccgtcctggcccatcttggcgaccaggatgcgcggccggcggccctcggcctcctcgaacgcgtccaccagggcacgggtgcggtccacggacggggactcgcctgcttcgttgcggtacacgccggagatcgtacggatctggctcgcgtgccggccgtacaccttctccagggcgtcggagatctcaccgacggtcgccttcgcacgggccgcgcgcacggccagctccagcaggttcccgtcgccgtcggcggcccgggtcagcgcgtcgagcgcgtcccggcactcggtctcgtcccgctccgcgcgcagccgccgcagcttctcgatctgctgggcgcgcaccgaggagttgtcgaccttgaggacctcgatctgctcgtcgctgtccacccggtacttgttgacgccgatcaccggctgccgcccggagtcgatgcgggcctgggtgcgggccgccgcctcctccacgcgcagcttcgggatgcccgcgtcgatggcctgcgccatgccgccggcctgctcgacctcctggatgtgtgcccaggccttccgggcgaggtcgtacgtgagccgctccacgtaggcgctgccgccccacgggtcgatgacccgggtggtgcccgactcctgctggatgagcagctgggtgttgcgggcgatgcgcgccgagaagtcggtgggcagcgcgagggcctcgtccagggcgttggtgtgcagcgactgggtgtggccctgcgtcgccgccatcgcctccacgcacgtgcgcgtgacgttgttgaacacgtcctgcgcggtcagcgaccagcccgaggtctgcgaatgggtgcgcagggacagcgacttggtgttcttcgggtcgaactgcgagaccagcttggcccacagcagccgggccgcccgcagcttggcgacctccatgaagaagttcatgccgatcgcccagaagaacgacagccgcggcgcgaacgcgtccacgtccaggcccgcctcgcgcccggcgcggatgtactcgacaccgtccgcgagggtgtaggccagctccaggtcggccgtggcaccggcctcctggatgtggtagccggagatggagatggagttgtagcggggcatccgctgcgaggtgaaggcgaagatgtcggagatgatccgcatcgacggcttcggcggatagatgtaggtgttgcggaccatgaactccttcagaatgtcgttctgaatggtcccggccagcttctcgggcggtacgccctgctcctccgcagccacgatgtacagcgccagcaccggcagcacggcgccgttcatcgtcatcgacacggtcatcctgtccagcgggatcccgtcgaacagctgccgcatgtcgtagatggagtcgatcgccacgcccgccatgccgacgtcgccggtcacgcgcgggtggtcgctgtcgtagccgcggtgcgtgggcaggtcgaaggcgaccgacaggcccttctgacccgccgccaggttgcggcggtagaacgcgttggactcctcggcggtcgagaagcccgcgtactggcggatcgtccagggctggttgacgtacatcgtcgggtacgggccgcgcagatacggcgtcatgcccgggtaggtgccgaggaagtccaggccctccaggtcacggccggtgtacagcggcttgaccccgatgccctccggggtctcccacaccggtgcctcgccaccggtcctgtgcttgacggccgtacgccagtccgcgtcaccgccctcggcgaccggggtccccagctcgatgccggagaagtcggggattcccatcaggacactcccatgcggtcgagggtcgcggagaggacgtccacggcgtcacagcccgcgaagacgtacgagtcgatgccggagtagtccccgcggcccgcgaggaacacctgccgggccccggccgcgcgcagcgactcggcgctctgggcggcctgttcggcgtagagggcgtcgctggagcacagcacggcctcggtggcgccgctgtcctcgaagcggccctcggtgaccggctcgatgccgcccgcctggaacaggttggcggcgaacgtcgcccgcgcggtgtacgcggcggccgggccgagcgtcgccaggaagatccggggccgggagccggtcgccgccagatgggcgtcggagcgggcgcggagggcctcgtacgcctcgtcccggcgcacccggggcagtccgccggacggcggctcgggcgccgcctcgcgctccaccggcttctcggcgagcagcgggaactcgctcacgccggtgatgggttcgcgccgcttggcgagcttcttggagcgctcggcccaggtcgtcgccaggtccgtacggatccgcccggagcgcagcacggccgcctggccgccgtcgcgctcgatggtccggaagaactcccaggcggcctgggcgagttcgtcggtgagccgttcgacgtaccaggagccgcccgcggggtcgatgacccgggccaggtgggactcctcgacgaggatcgtggaggtgttgcgggcgatacggcgggagaacgcgtccggcagcccgagtgcgtggtcgaagggcagcacggtgaccgagtcggcgccgccgaccccggcggccagcgtcgcgaccgtcgtgcggagcatgttcacccacgggtcgcggcgggtcatcatcaccggcgaggtcaccgcgtgctgcacctgcgcgcccgcgccgggcgccccggacacctcggcgacccgcgcccacaggcggcgtgccgcgcgcagcttggcgatggtcaggaactggtcggcggtggccgcgtagcggaactccagctgggcgcaggccgcttcgaccgtgaggccggcctcggtcagctcgcgcaggtaggccacaccggtggcgagggaggcgccgagttcctgcgcggccgagccgcccgcctcgtggtacggcagcgcgtccacggtcagcgcgcgcaggcccgggtagcgctcggcacagcgtgcggcgagcgcggcgacgggcgcgaagtccagcggggtgccggtgcgggcctcgtgaccgagcgggtccgcgcccaggttgccgcgcacggccttcgggtcgatgctcctgtcctcgtacagccgcagcagctcggccgcggcggcctcgacgtcacggccggcgtccaggaccaccggggccaggtcgagatagacgccgtcgagggcgcgcgcgatgccggacaccgggatgccgccctggcccacgagcagccagagcgaggtgacgccgttctccaggtcggcgaggacggcgccgtcgaccggtgccgcgtgccgctgccgtacgtcccagccgcccgtggtgttgccctcggggcggccgccgcgcacgaacggggcgaagcccggcagaccggggtcgggcgcgccgtcgcgcgctgtgtacaggggccgggtgcgcagcccgtcctcgagcgtggtggacagggcgtcctcagctgccgtacccgagacttccttgcccgacttgcgcagcacaccctcgaccaggcgttgccactgctcgtgtgtcgcgtcagggaactcggcggccagtgagagcccgtcgtcaggcaggaccgtcatggctcggatgctagggcagcagcgttgactcagagcagagccaggcttgtgacgtttccctc

What is claimed is:

1. A compound of Formula (I):

[chemical structure]

2. The compound of claim 1, wherein the compound is produced by a host cell comprising a heterologous biosynthetic gene cluster comprising at least six nonribosomal peptide synthetase (NRPS) modules and at least four polyketide synthase (PKS) modules, a set of modifying enzymes, precursor biosynthesis enzymes, transporters, and one or more transcriptional regulators.

3. The compound of claim 2, wherein the biosynthetic gene cluster is isolated or derived from Streptomyces griseochromogenes strain ATCC 14511.

4. The compound of claim 2 of claim 3, wherein the biosynthetic gene cluster comprises a sequence of SEQ ID NO: 1.

5. The compound of any one of claims 2-4, wherein the biosynthetic gene cluster comprises one or more modifications of SEQ ID NO: 1.

6. The compound of any one of claims 2-5, wherein the modification comprises a substitution, deletion, inversion, or insertion of one or more nucleotides relative to SEQ ID NO: 1.

7. The compound of claim 5 or claim 6, wherein the modification comprises insertion of at least one promoter sequence.

8. The compound of claim 7, wherein the promoter is selected from the group consisting of ermE, kasO, gapdh, and rpslp, or functional variants or derivatives thereof.

9. The compound of any one of claims 5-8, wherein the modification increases synthesis of the compound of Formula (I) compared to an otherwise equivalent host cell comprising an unmodified biosynthetic gene cluster.

10. The compound of any one of claims 2-9, wherein the host cell is a Streptomyces albus cell.

11. The compound of any one of claims 2-10, wherein the host cell further comprises a sequence encoding a Streptomyces Antibiotic Regulatory Protein (SARP) operably linked to a constitutive promoter.

12. A polynucleotide comprising a biosynthetic gene cluster, wherein the biosynthetic gene cluster comprises one or more genes that contribute to the production of at least a portion of the compound of claim 1 when the biosynthetic gene cluster is expressed by a host cell

13. The polynucleotide of claim 12, wherein the one or more genes comprise six nonribosomal peptide synthetase (NRPS) modules.

14. The polynucleotide of claim 13, wherein the six NRPS modules are encoded by sequences comprising a first NRPS open reading frame of SEQ ID NO: 14, a second NRPS open reading frame of SEQ ID NO: 15, a third NRPS open reading frame of SEQ ID NO: 16 and a fourth NRPS open reading frame of SEQ ID NO: 17, or sequences having at least 90%, at least 95%, at least 97% or at least 99% identity thereto.

15. The polynucleotide of any one of claims 12-14, wherein the one or more genes comprise four polyketide synthase (PKS) modules.

16. The polynucleotide of claim 15, wherein the four PKS modules are encoded by sequences comprising a first PKS open reading frame of SEQ ID NO: 26 and a second PKS open reading frame of SEQ ID NO: 27, or sequences having at least 90%, at least 95%, at least 97% or at least 99% identity thereto.

17. The polynucleotide of any one of claims 12-16, wherein the biosynthetic gene complex comprises a Streptomyces Antibiotic Regulatory Protein (SARP)-encoding gene.

18. The polynucleotide of claim 17, wherein the SARP-encoding gene comprises a sequence of SEQ ID NO: 28, or a sequence having at least 90%, at least 95%, at least 97% or at least 99% identity thereto.

19. The polynucleotide of any one of claims 12-18, wherein the biosynthetic gene cluster comprises a sequence of SEQ ID NO: 1, or a sequence having at least 90%, at least 95%, at least 97% or at least 99% identity thereto.

20. The polynucleotide of any one of claims 12-19, wherein the host cell is engineered to express the one or more genes in the biosynthetic cluster, which results in the production of the compound of Formula (I).

21. The polynucleotide of any one of claims 12-19, wherein overexpression of one or more genes in the biosynthetic cluster by the host cell increases the production of the compound of Formula (I) compared to an otherwise equivalent host cell comprising a biosynthetic gene cluster that does not overexpress one or more genes in the biosynthetic cluster.

22. The polynucleotide of claim 20 or claim 21, wherein the SARP is overexpressed.

23. The polynucleotide claim 22, wherein overexpression of the SARP occurs in cis or in trans.

24. The polynucleotide of claim 23, trans overexpression of the SARP comprises expressing a sequence encoding the SARP open reading frame under the control of a constitutive ermE promoter, or a functional variant or derivative thereof.

25. The polynucleotide of claim 24, wherein the ermE promoter comprises a sequence of SEQ ID NO:33.

26. The polynucleotide of any one of claims 12-15, wherein the biosynthetic gene cluster comprises one or more sequence modifications relative to a biosynthetic gene cluster of SEQ ID NO:1, or a sequence having at least 95%, at least 97% or at least 99% identity thereto.

27. The polynucleotide of claim 26, wherein the one or more modifications of the biosynthetic gene cluster comprises a substitution, deletion, inversion, or insertion of one or more nucleotides relative to SEQ ID NO: 1.

28. The polynucleotide of claim 26 or claim 27, wherein the one or more modifications comprise modifications of a promoter of a gene in the biosynthetic gene cluster.

29. The polynucleotide of claim 26 or claim 27, wherein the one or more modifications comprise insertion of at least one heterologous promoter in the biosynthetic gene cluster.

30. The polynucleotide of claim 29, wherein the at least one heterologous promoter is a strong promoter.

31. The polynucleotide of claim 29 or claim 30, wherein the at least one heterologous promoter is selected from the group consisting of ermE, kasO, gapdh, and rpslp, or functional variants or derivatives thereof.

32. The polynucleotide of claim 31, wherein the sequence of the ermE promoter comprises SEQ ID NO: 33, the sequence of the kasO promoter comprises SEQ ID NO:34, the sequence of the gapdh promoter comprises SEQ ID NO:35, and the sequence of the rpslp promoter comprises SEQ ID NO:36, or sequences having at least 90%, at least 95%, at least 97% or at least 99% identity thereto.

33. The polynucleotide of any one of claims 29-32, wherein inserting the at least one heterologous promoter into the biosynthetic gene cluster comprises a nucleic acid guided endonuclease.

34. The polynucleotide of claim 33, wherein the nucleic acid guided endonuclease is in a complex with at least one guide nucleic acid (gNA).

35. The polynucleotide of claim 33 or claim 34, wherein the nucleic acid guided endonuclease is a CRISPR/Cas endonuclease.

36. The polynucleotide of claim 35, wherein the CRISPR/Cas endonuclease is Cas9.

37. The polynucleotide of any one of claims 29-36, wherein inserting the at least one heterologous promoter into the biosynthetic gene cluster further comprises a donor template comprising a sequence of the heterologous promoter.

38. The polynucleotide of any one of claims 29-37, wherein the biosynthetic gene cluster comprises an mbtH gene upstream of the four NRPS open reading frames, and wherein the at least one heterologous promoter is inserted upstream of the mbtH gene.

39. The polynucleotide of claim 38, wherein the at least one heterologous promoter is a kasO promoter.

40. The polynucleotide of claim 38 or claim 39, wherein the targeting sequence of the at least one gNA comprises SEQ ID NOS: 40-44, or a sequence having at least 80%, at least 85%, at least 90%, or at least 95% thereto.

41. The polynucleotide of claim 39 or claim 40, wherein the biosynthetic gene cluster comprises a sequence of SEQ ID NO: SEQ ID NO: 49.

42. The polynucleotide of any one of claims 29-37, wherein the at least one heterologous promoter is inserted between the sequence of the SARP-encoding gene and the first PKS open reading frame.

43. The polynucleotide of any one of claims 29-42, wherein the biosynthetic gene cluster comprises an ornithine monooxygenase gene downstream of the second PKS open reading frame, and wherein the at last one heterologous promoter is inserted downstream of the second PKS open reading frame and upstream of the ornithine monooxygenase gene.

44. The polynucleotide of any one of claims 12-27, wherein the at least one modification of the biosynthetic gene cluster comprises a modification that results in overexpression of the SARP-encoding gene in comparison to the expression of the SARP-encoding gene by the biosynthetic gene cluster of SEQ ID NO: 1.

45. The polynucleotide of any one of claims 12-27, wherein the at least one modification of the biosynthetic gene cluster comprises replacement of at least one promoter in comparison to the biosynthetic gene cluster of SEQ ID NO: 1.

46. The polynucleotide of claim 45, wherein replacement of the at least one promoter comprises replacement a SARP-encoding gene promoter.

47. The polynucleotide of claim 46, wherein the SARP-encoding gene promoter is replaced with a promoter selected from the group consisting of ermE, kasO, gapdh, and rpslp.

48. The polynucleotide of any one of claims 12-28, wherein the biosynthetic gene cluster comprises a sequence of SEQ ID NO: 50.

49. The polynucleotide of any one of claims 12-48, wherein the biosynthetic gene cluster is isolated or derived from Streptomyces griseochromogenes strain ATCC 14511.

50. The polynucleotide of any one of claims 12-49, wherein the biosynthetic gene cluster produces the compound of Formula (I) in the host cell.

51. A vector comprising the polynucleotide of any one of claims 12-50.

52. The vector of claim 51, wherein the vector is a bacterial artificial chromosomal vector.

53. The vector of claim 51 or claim 52, wherein the vector further comprises at least one promoter.

54. The vector of any one of claims 51-53, wherein the vector is suitable for expression in a Streptomyces species cell.

55. A host cell comprising the polynucleotide of any one of claims 12-50 or the vector of any one of claims 51-54.

56. A host cell, comprising the polynucleotide of any one of claims 12-50 and a polynucleotide comprising a sequence encoding a SARP operably linked to a constitutive promoter.

57. The host cell of claim 56, wherein the constitutive promoter is an ermE promoter.

58. The host cell of claim 56 or claim 57, wherein the SARP is encoded by a sequence of SEQ ID NO: 28.

59. The host cell of any one of claims 55-58, wherein the host cell is an Actinobacterial cell.

60. The host cell of any one of claims 55-59, wherein the host cell is a Streptomyces cell.

61. The host cell of claim 60, wherein the Streptomyces cell is a Streptomyces griseochromogenes, Streptomyces lividans or Streptomyces albus cell.

62. A method of making a polynucleotide comprising a modified biosynthetic gene cluster comprising:
a. providing a first E. coli host cell comprising a first vector comprising a sequence of an unmodified biosynthetic gene cluster comprising a target sequence;
b. introducing the first vector into a Streptomyces host cell by conjugation;
c. providing a second E. coli host cell comprising a second vector comprising:
i. a sequence of at least one gNA specific to the target sequence operably linked to a promoter,
ii. a sequence encoding a Cas9 endonuclease; and
iii. a sequence encoding a donor template; and
d. introducing the second vector into a Streptomyces host cell by conjugation; whereby introducing the second vector into the Streptomyces host cell produces a double strand break in the target sequence and introduction of a donor template sequence, thereby generating a Streptomyces host cell comprising a modified biosynthetic gene cluster.

63. The method of claim 62, wherein the unmodified biosynthetic gene cluster comprises a sequence of SEQ ID NO: 1.

64. The method of claim 62 or 63, wherein the donor template comprises, from 5′ to 3′, a sequence homologous to a sequence 5′ of the target sequence, a sequence of a promoter, and sequence homologous to a sequence 3′ of the target sequence.

65. The method of claim 64, wherein the promoter is selected from the group consisting of ermE, kasO, gapdh, and rpslp, or functional variants or derivatives thereof.

66. The method of any one of claims 62-65, wherein the at least one gNA comprises a target sequence selected from the group consisting of SEQ ID NOS: 40-44.

67. A method of making the compound of Formula (I), comprising
a. introducing into a host cell the polynucleotide of any one of claims 12-50 or the vector of any one of claims 51-54;
b. culturing the host cell under conditions sufficient for the synthesis of the compound of Formula (I) by the biosynthetic gene cluster; and
c. isolating and purifying the compound of Formula (I).

68. The method of claim 67, wherein the host cell is an Actinobacterial cell or a Streptomyces cell.

69. The method of claim 68, wherein the Streptomyces cell is a Streptomyces griseochromogenes, Streptomyces albus or Streptomyces lividans cell.

70. The method of any one of claims 67-69, wherein the host cell comprises a sequence encoding a SARP operably linked to a constitutive promoter.

71. The method of any one of claims 67-70, wherein the polynucleotide or vector is introduced into the host cell by conjugation with an E. coli comprising the polynucleotide or vector.

72. A pharmaceutical composition, comprising the compound of claim 1, and a pharmaceutically acceptable excipient.

73. A method of treating a disease or disorder in a subject, comprising administering the compound of claim 1 or pharmaceutical composition of claim 72.

74. A compound of claim 1 or the pharmaceutical composition of claim 72, for use in treating a disease or disorder in a subject.

75. A compound of claim 1 for use in the manufacture of a medicament for treating a disease or disorder in a subject.

76. Use of a compound of claim 1 or the pharmaceutical composition of claim 72, for the treatment of a disease or disorder.

77. The method, use, or compound of any one of claims 73-76, wherein the disease or disorder is cancer.

78. The method, use, or compound of any one of claims 73-76, wherein the disease or disorder is fibrosis.

79. The method, use, or compound of any one of claims 73-78, wherein the subject is human.
